(19) United States
(12) Patent Application Publication
(10) Pub. No.: US 2015/0168425 A1
(43) Pub. Date: Jun. 18, 2015

(54) METHOD AND AGENTS TO QUANTIFY PROTEINS FROM TISSUES

(71) Applicant: Agada Biosciences, LLC, Halifax (CA)

(72) Inventors: Yetrib Hathout, Silver Spring, MD (US); Kristy Brown, Rockville, MD (US); Eric Hoffman, Kensington, MD (US)

(21) Appl. No.: 14/573,984

(22) Filed: Dec. 17, 2014

Related U.S. Application Data
(60) Provisional application No. 61/917,153, filed on Dec. 17, 2013.

(51) Int. Cl. G01N 33/68

(52) U.S. Cl. CPC G01N 33/6887; G01N 2333/4712

(57) ABSTRACT

As described herein, a robust generalizable method to accurately and sensitively quantitate proteins in tissues and fluids from human patients in a direct manner, not reliant on antibody reagents has been developed. This provides new and robust methods that are useful as biochemical outcome measures in human clinical trials. The methods where mouse tissues fully labeled with stable isotopes are mixed with the human tissue of interest, and the mixture subjected to high throughput proteomics methods are provided. The method detects multiple protein peptides showing 100% conservation between human and mouse, and establishes test and control proteins for quantitation of surrogate biomarkers. This assay method provides a high degree of reliability and sensitivity, as well as generalizability, compared to more traditional antibody-based assays. The specific peptide pairs and methods of quantitation are also described. In an additional embodiment, labeled standards may be derived from labeled human cell culture, such as a myotube culture.

### RELATED APPLICATIONS

[0001] This application claims priority to U.S. Provisional Application No. 61/917,153 filed Dec. 17, 2013, the contents of which are incorporated herein in its entirety and for all purposes.

### STATEMENT REGARDING SEQUENCE LISTING

[0002] The Sequence Listing associated with this application is provided in text format in lieu of a paper copy, and is hereby incorporated by reference into the specification. The name of the text file containing the Sequence Listing is 100175_{—}401_SEQUENCE LISTING.txt. The text file is 1.2 MB, was created on Dec. 16, 2014, and is being submitted electronically via EFS-Web.

### FIELD OF THE INVENTION

[0003] The invention generally relates to methods and agents that enable the sensitive and reliable detection and quantification of proteins of interest in human tissues from patients enrolled in clinical trials (surrogate biochemical biomarker). The invention enables and facilitates regulatory review by providing robust measurements of surrogate biochemical biomarkers at accuracies far exceeding previous methods.

### BACKGROUND OF THE INVENTION

[0004] Bringing a new drug (new chemical entity; NCE) to market and to the benefit of patients requires regulatory agency approvals, and such approvals require clinical trials. Proving that a NCE shows efficacy often depends on showing improvement of clinical outcome measures, typically related to patient quality of life. However, clinical outcome measures often require clinical trials of long duration, and the endpoints can be subjective and variable. These increase the number of patients needed for a robust clinical trial, their cost, and time required.

[0005] An alternative to clinical endpoints in clinical trials are surrogate biochemical biomarkers as endpoints (1). A surrogate biochemical endpoint should have a compelling rationale for being reflective of the underlying disease process, and should be able to be measured using sensitive and reliable assay methods. If robust biomarkers are identified, then consideration of accelerated approval for a drug may be based on the biomarker data alone, without associated clinical endpoint data. One of the more compelling connections between a disease and a biomarker is with regards to inherited disease, where gene mutations lead to loss of the corresponding protein product in a tissue. This inherited inborn error of metabolism initiates the cascade of pathologies that lead to the patient's clinical picture. An increasing number of drug development programs aim to replace the missing protein in patient tissue, thus directly addressing the primary biochemical defect. As the connection between the primary gene/protein deficiency and the disease process is compelling then quantifying the replacement of this same protein in clinical trials is generally viewed as a valid biochemical surrogate endpoint.

[0006] For example, dystrophin is a relatively large (427 kDa) multi-domain protein that plays an essential role in muscle fiber integrity and function. It is predominantly expressed in skeletal muscle by other isoforms have been found expressed in heart and brain (15). Dystrophin is a fairly low abundance protein, accounting for approximately 0.002% of the total striated muscle protein (2). Gene mutations resulting in the complete loss of dystrophin protein expression are the cause of Duchenne muscular dystrophy (DMD), the most common and severe form of muscular dystrophy (16). Mutations resulting in the production of a truncated but partially functional dystrophin protein give rise to a milder dystrophinopathy termed Becker muscular dystrophy (BMD). In general, BMD patients have longer lives and less severe clinical presentations than DMD patients. This is mainly due to the presence of the partially functional dystrophin protein in BMD patients (17). But, BMD patients do have a wide variety of phenotypes ranging from mild to severe most probably due to the variable amounts of expressed dystrophin often seen in BMD population (18).

[0007] The need to accurately detect and quantitate dystrophin in human skeletal muscle biopsies is becoming crucial as new promising therapies aiming to restore dystrophin expression, especially in DMD patients, are entering phase II/III clinical trials (3-7). Perhaps one of the most promising new generation therapies for DMD is “exon skipping” which has been effective in restoring dystrophin expression and muscle force in both mouse and dog models of DMD (19, 20). The goal of this approach is to “skip” an exon neighboring a deletion mutation during pre-mRNA splicing, thereby restoring the mRNA reading frame, resulting in the production of a shorter length, partially functional Becker-like dystrophin protein. As such, quantification of dystrophin protein is an ideal endpoint measure and clinically meaningful since it is directly linked to the disease.

[0008] Most existing methods used to quantify proteins rely on antibodies, and assays association with antibody binding to the target protein. Antibody-based methods, such as immunoblotting, immunostaining, and ELISA methods are inherently indirect methods of assaying proteins, and are typically associated with assay-to-assay variability due to the indirect nature of the tests. Also, robust immunological assays for a target protein require well characterized and highly specific antibody reagents, yet these do not exist for the large majority of target proteins that may be used as surrogate biochemical endpoints in clinical trials. Thus, there is a need to directly measure proteins in patient tissue, in order to develop robust biochemical endpoints for clinical trials.

### SUMMARY OF THE INVENTION

[0009] As described herein, a robust generalizable method to accurately and sensitively quantitate protein of interest in tissues and body fluids from human patients in a direct manner, not reliant on antibody reagents has been developed. This provides new and robust methods that are useful as biochemical outcome measures in human clinical trials. Methods where mouse tissues, or human cells in culture, fully labeled with stable isotopes are mixed with the human tissue of interest, and the mixture subjected to precision mass spectrometry proteomics methods are provided. The method detects multiple protein peptides showing 100% conservation between human and mouse (or between human and human cell culture), and establishes test and control proteins for quantitation of surrogate biomarkers. This assay method provides a high degree of reliability and sensitivity, as well as generalizability, compared to more traditional antibody-based assays. The specific peptide pairs and methods of quantitation are also described.

[0010] According to an aspect of the present invention, there is provided a method for identifying candidate peptide markers for a protein from a biological sample of interest. The method comprising the steps of: extracting proteins from the biological sample of interest and a corresponding biological sample from an animal that has been labeled with one or more stable isotopic amino acids; mixing a quantity of protein from the biological sample of interest with a quantity of protein from the corresponding biological sample from the labeled animal to form a spiked sample; separating the spiked sample based on a physical property; digesting the proteins of interest using a protease; subjecting the digested samples to mass spectrometry analysis; and identifying unique candidate peptide markers that correspond to a protein.

[0011] In another embodiment of the present invention, the biological sample that has been labeled with one or more stable isotopic amino acids may be obtained from human cell culture, such as a human muscle cell line (myotubes) culture.

[0012] According to another aspect of the present invention, there is provided a method for quantifying expression of a biomarker from a biological sample obtained from a subject with a disease or disorder. The method comprising the steps of: extracting proteins from the biological sample of interest; mixing a known quantity of protein from the biological sample of interest with a known quantity of protein a the corresponding biological sample from a labeled animal or a labeled synthetic peptide corresponding to a protein of interest to form a spiked sample; separating the spiked sample based on a physical property; digesting the proteins of interest using a protease; subjecting the digested samples to mass spectrometry analysis; determining intensities of unique candidate peptide markers that correspond to a proteins of interest; and quantifying the amount of the protein of interest in the sample based on the relative intensity of the unique candidate peptide markers. In another embodiment, the labeled sample may be obtained from human cell culture, such as a human muscle cell line (myotubes) culture.

[0013] In one embodiment, the step of quantifying comprises comparing peak areas and area ratios of one or more unique candidate peptide markers from the biological sample of interest to the peak areas and area ratios of one or more labeled peptide markers.

[0014] In another embodiment, the step of quantifying comprises comparing the relative intensities to a standard curve generated by creating a series of dilutions of a biological sample from a normal subject with a biological sample from a subject with a disease or disorder, wherein the amount of total protein in the mixed sample remains constant; mixing a known quantity of protein from the mixed sample with a known quantity of protein a corresponding biological sample from a labeled animal or a labeled synthetic peptide corresponding to a protein of interest to form a spiked sample; separating the spiked sample based on a physical property; digesting the proteins of interest using a protease; subjecting the digested samples to mass spectrometry analysis; and generating a titration curve based on the intensities obtained for each sample. In another embodiment, the labeled sample may be obtained from human cell culture, such as a human muscle cell line (myotubes) culture.

[0015] According to a further aspect of the invention, there is provided a method for quantifying dystrophin expression from a biological sample obtained from a subject with Duchenne's Muscular Dystrophy. The method comprising the steps of: extracting proteins from the biological sample of interest; mixing a known quantity of total protein from the biological sample of interest with a known quantity of total protein a the corresponding biological sample from a labeled animal, a labeled human cell culture such as a human muscle cell line (i.e. myotubes) culture, or a labeled synthetic peptide corresponding to dystrophin to form a spiked sample; separating the spiked sample based on a physical property; digesting the proteins of interest using a protease; subjecting the digested samples to mass spectrometry analysis; and quantifying the amount of the protein of interest in the sample based on the relative intensity of the unique candidate peptide markers.

[0016] In one embodiment, the step of quantifying comprises comparing peak areas and area ratios of one or more unique candidate peptide markers from the biological sample of interest to the peak areas and area ratios of one or more labeled peptide markers.

[0017] In another embodiment, the step of quantifying comprises comparing the relative intensities to a standard curve generated by creating a series of dilutions of a biological sample from a normal subject with a biological sample from a subject with a disease or disorder, wherein the amount of total protein in the mixed sample remains constant; mixing a known quantity of protein from the mixed sample with a known quantity of protein a corresponding biological sample from a labeled animal, a labeled human cell culture such as a human muscle cell line (i.e. myotubes) culture, or a labeled synthetic peptide corresponding to a protein of interest to form a spiked sample; separating the spiked sample based on a physical property; digesting the proteins of interest using a protease; subjecting the digested samples to mass spectrometry analysis; and generating a titration curve based on the intensities obtained for each sample.

[0018] In a further embodiment, the subject is being treated with a pharmaceutical composition.

[0019] In a yet further embodiment, the one or more peptides are selected from QAPIGGDFPAVQK (SEQ ID NO: 6463), VLSQIDVAQK (SEQ ID NO: 6445), IFLTEQPLEGLEK (SEQ ID NO: 6441), TLNATGEEIIQQSSK (SEQ ID NO: 940), and VHALNNVNK (SEQ ID NO: 6465).

[0020] In a still further embodiment, the proteins are extracted using a buffer comprising 10% sodium-dodecyl sulfate (SDS).

[0021] In an embodiment, the known quantity of total protein corresponding to the biological sample from a labeled animal, or from a labeled human cell culture (i.e. a muscle cell culture, or a myotube cell culture) is half the known quantity of total protein from the biological sample of interest.

[0022] In another embodiment, the known quantity of total protein corresponding to the biological sample of interest is 50 μg and the known quantity of total protein the corresponding to the biological sample from a labeled animal or from a labeled human cell culture (i.e. a muscle cell culture, or a myotube cell culture) is 25 μg.

[0023] In a further embodiment, the protease is trypsin.

[0024] In a yet further embodiment, the spiked sample is separated based on size, charge, shape or a combination thereof using electrophoresis.

[0025] In a still further embodiment, the spiked sample is separated using gel electrophoresis.

[0026] In one embodiment, the method further comprising the step of excising a portion of the gel containing the proteins of interest prior to the digesting step.

### BRIEF DESCRIPTION OF THE DRAWINGS

[0027] These and other features, aspects and advantages of the present invention will become better understood with regard to the following description and accompanying drawings wherein:

[0028] FIG. 1 is a flow chart showing the experimental design used to quantitate dystrophin protein in human skeletal muscle. Left panel shows the post-digestion spike-in approach where 50 μg total muscle protein extract from human bisopsie were fractionated on SDS-PAGE using 3-8% Tris-Acetate gel, which is suitable for high molecular mass proteins. Then the area corresponding to dystrophin migration level (dashed blue lines) was serially sliced, in-gel digested by trypsin and spiked with stable isotope labeled standard peptides standards for subsequent LC-MS/MS analysis and peptide quantitation. In the Pre-digestion spike-in approach (right panel), 50 μg total muscle protein extract was spiked with 25 μg of ¹³C₆-Lysine labeled SILAC mouse muscle protein extract. The mixture was then fractionated by SDS-PAGE and the area corresponding to dystrophin migration was excised, in-gel digested and the resulting peptides were analyzed by LC-MS/MS for identification and quantitation;

[0029] FIG. 2 shows representative mass spectra of spiked-in labeled standard peptides and corresponding unlabeled endogenous peptide using a post-digestion spike-in approach (A) Mass spectra of labeled and unlabeled peptide pairs detected after spiking in-gel digested dystrophin with varying amounts of ¹³C₆, ¹⁵N₂ Lysine labeled standard peptide [IFLTEQPLEGLEK] (SEQ ID NO: 6441). (B) Shows mass spectra of labeled and unlabeled peptide pairs detected after spiking in-gel digested dystrophin with varying amounts of 13C6, 15N2 Lysine labeled standard peptide [LLDLLEGLTGQK] (SEQ ID NO: 937), (C) Shows mass spectra of labeled and unlabeled peptide pairs detected after spiking in-gel digested dystrophin with varying amounts of 13C6, 15N4 Lysine labeled standard [LLVEELPLR] (SEQ ID NO: 6453). The concentration of each spike-in standard peptide, starting for the top to the low panels, was as follows (160 nM, 80 nM, 40 nM and 14 nM). Samples were analyzed on the LTQ-Orbitrap XL at 30,000 resolution and mass error better than 10 ppm. All ions were detected as doubly protonated species with the correct m/z values;

[0030] FIG. 3 represents mass spectrometry data obtained for triplicate experiments using the same extract from a muscle biopsy obtained from a healthy donor. Three aliquots of 50 μg total muscle protein extract were separated by SDS-PAGE as described in Methods. The migration area corresponding to dystrophin was excised, in-gel digested and spiked with optimal concentration (30 nM) of stable isotope labeled standard peptides. The left panel shows MS spectra of unlabeled peptide [IFLTEQPLEGLEK] (SEQ ID NO: 6441) generated from endogenous dystrophin and the spike-in stable isotope labeled standard peptide [IFLTEQPLEGLEK*] (SEQ ID NO: 6441). Both peptides were detected as doubly charged ions at their corresponding m/z value of 758.92 and 762.92, respectively. The right panel shows extracted ion chromatograms used for ratio measurement of unlabeled endogenous dystrophin peptide (blue trace) to the stable isotope labeled standard peptide (red trace);

[0031] FIG. 4 is a graphical representation showing inter sample reproducibility of the post-digestion spike-in approach. Three samples containing varying amount of dystrophin obtained by mixing muscle extract from a DMD and age matched healthy donor at ratio of 25/75, 50/50 and 75/25 respectively were evaluated for dystrophin quantitation using the post-digestion spike-in approach with 30 nM of stable isotope standard peptides. Histograms represent intensity ratios of endogenous dystrophin peptides and filamin c peptide to their corresponding stable isotope labeled standard peptide. P1, P2 and P3 corresponds to dystrophin peptides [LLDLLEGLTGQK] (SEQ ID NO: 937), [LLVEELPLR] (SEQ ID NO: 6453), [IFLTEQPLEGLEK] (SEQ ID NO: 6441) respectively and P4 correspond to filamin c peptide [VYNVTYTVK] (SEQ ID NO: 2830) that was used as an internal control. It is clearly seen that some ratios did not decrease with decreasing amounts of dystrophin, especially for the peptide Pl, showing high variability for this approach;

[0032] FIG. 5 is a graphical representation showing a titration curve of dystrophin protein and other muscle specific proteins using predigestion spike-in approach. Dystrophin protein, as well as myomesin and filamin c, were quantitated in different combination mixtures of muscle extracts from DMD and age matched healthy donors at ratios leading to 0, 5, 10, 25, 50, 75, 90, 95 and 100% of dystrophin relative to normal. Each final mixture contained 50 μg of total muscle protein and was spiked with 25 μg of ¹³C₆-Lysine labeled SILAC mouse muscle extract. Gel bands encompassing dystrophin protein and other muscle specific proteins were excised and processed for mass spectrometry analysis as described in Methods. Transition ion intensities obtained at the MS/MS level for the targeted labeled and unlabeled peptide pairs generated from the spike-in standard and endogenous human dystrophin were used to determine the relative amount of dystrophin and other muscle proteins (myomesin and filamin c). Standard deviation at each data point represents average ratios obtained from labeled and unlabeled peptide pairs: 5 pairs for dystrophin protein (QAPIGGDFPAVQK (SEQ ID NO: 6463), VLSQIDVAQK (SEQ ID NO: 6445), IFLTEQPLEGLEK (SEQ ID NO: 6441), TLNATGEEIIQQSSK (SEQ ID NO: 940), VHALNNVNK (SEQ ID NO: 6465)); 3 pairs for filamin c (SPFVVNVAPPLDLSK (SEQ ID NO: 2850), EVGEHVVSVRK (SEQ ID NO: 6501), HIGISFTPK (SEQ ID NO: 2822)) and two pairs for myomesin (VSEPVAALDPAEK (SEQ ID NO: 2270), VLGGLPDWTIQEGK (SEQ ID NO: 6502)). These peptides have 100% sequence homology between human and mouse 100% sequence homology between human and mouse and were used for ratio measurements. As expected, dystrophin protein increased with increasing relative amount of normal muscle extract while myomesin and filamin c remained unchanged; and

[0033] FIG. 6 is a graphical representation showing calculated absolute amount of dystrophin in muscle biopsies obtained from BMD and age matched healthy controls. Total protein extract (50 μg) from each biopsy was spiked with 25 μg of C₆-Lysine labeled SILAC mouse muscle extract and processed using the pre-digestion spike-in approach (see FIG. 1 and Methods). Intensity ratios of labeled and unlabeled peptide pairs were used to determine the absolute amount of dystrophin in each muscle extract.

### DETAILED DESCRIPTION OF THE INVENTION

[0034] Described herein are methods for identifying candidate peptide markers for a protein from a biological sample of interest, as well as for quantifying a protein from a biological sample of interest. In some embodiments, methods for quantitating specific proteins in a biological sample of interest using labeled peptides and mass spectrometry analysis are provided. It will be appreciated that the embodiments described herein are for illustrative purposes, and not intended to be limiting in any way.

[0035] Without wishing to be limiting in any way, it is envisioned that some or all of the following steps may be performed when carrying out an embodiment of a method for identifying candidate peptide markers for a protein from a biological sample of interest:
[0036] extracting proteins from a biological sample of interest,
[0037] obtaining a labeled protein and/or peptide sample with peptide fragments and/or protein corresponding to one or more candidate peptide markers for a protein,
[0038] mixing a quantity of protein from the biological sample of interest with a quantity of the labeled protein and/or peptide sample to produce a spiked sample,
[0039] separating at least a portion of the spiked sample based on a physical property using, for example, gel electrophoresis,
[0040] obtaining a separated sample comprising at least the one or more protein(s) of interest,
[0041] digesting the separated sample using, for example, a protease,
[0042] analyzing the digested sample using mass spectrometry analysis, and
[0043] identifying unique candidate peptide markers that correspond to a protein.

[0044] In certain embodiments, it is envisioned that some or all of the following steps may be performed when carrying out an embodiment of a method for identifying candidate peptide markers for a protein from a biological sample of interest:
[0045] extracting proteins from a biological sample of interest,
[0046] obtaining a labeled protein and/or peptide sample with peptide fragments and/or protein corresponding to one or more candidate peptide markers for a protein,
[0047] separating at least a portion of the extracted protein sample based on a physical property using, for example, gel electrophoresis,
[0048] digesting the separated sample using, for example, a protease, using, for example, in-gel digestion,
[0049] obtaining a separated sample comprising at least the one or more protein(s) of interest,
[0050] mixing a quantity of the separated sample with a quantity of the labeled protein and/or peptide sample to produce a spiked sample,
[0051] analyzing the spiked sample using mass spectrometry analysis, and
[0052] identifying unique candidate peptide markers that correspond to a protein.

[0053] Without wishing to be limiting in any way, it is envisioned that some or all of the following steps may be performed when carrying out an embodiment of a method for identifying candidate peptide markers for a protein from a biological sample of interest:
[0054] extracting proteins from a biological sample of interest,
[0055] obtaining a labeled protein and/or peptide sample with peptide fragments and/or protein corresponding to one or more candidate peptide markers for a protein,
[0056] mixing a quantity of protein from the biological sample of interest with a quantity of the labeled protein and/or peptide sample to produce a spiked sample,
[0057] separating at least a portion of the spiked sample based on a physical property using, for example, gel electrophoresis,
[0058] obtaining a separated sample comprising at least the one or more protein(s) of interest,
[0059] digesting the separated sample using, for example, a protease,
[0060] analyzing the digested sample using mass spectrometry analysis, and
[0061] identifying unique candidate peptide markers that correspond to a protein.

[0062] In certain embodiments, it is envisioned that some or all of the following steps may be performed when carrying out an embodiment of a method for identifying candidate peptide markers for a protein from a biological sample of interest:
[0063] extracting proteins from a biological sample of interest,
[0064] obtaining a labeled protein and/or peptide sample with peptide fragments and/or protein corresponding to one or more candidate peptide markers for a protein,
[0065] mixing a quantity of protein from the biological sample of interest with a quantity of the labeled protein and/or peptide sample to produce a spiked sample,
[0066] separating at least a portion of the spiked sample based on a physical property using, for example, gel electrophoresis,
[0067] obtaining a separated sample comprising at least the one or more protein(s) of interest,
[0068] digesting the separated sample using, for example, a protease,
[0069] analyzing the digested sample using mass spectrometry analysis, and
[0070] identifying unique candidate peptide markers that correspond to a protein.

[0071] In certain embodiments, the labeled protein and/or peptide sample with peptide fragments and/or protein corresponding to one or more candidate peptide markers for a protein may comprise at least some amino acid sequences with 100% identity to at least a portion of the protein of interest from the biological cample.

[0072] In a further embodiment, the biological sample may be any biological sample of interest. By way of example, the biological sample may be a biopsy or other tissue sample. The biological sample may be from a muscle tissue, a brain tissue, a tissue biospsied in clinical trials, blood, serum, plasma, urine, cerebrospinal fluid or other biological sample or biological fluid of interest.

[0073] In another embodiment, the biological sample may be spiked with a quantity of labeled protein. The labeled protein, may be labeled with ¹³C6-Lysine, ¹³C6-¹⁵N2-Lysine, ¹³C6-¹⁵N4-Arginine, combinations thereof, or using other appropriate protein labeling techniques (e.g. ¹⁵N labeling or any other amino acid) as will be known to those of skill in the art.

[0074] In a further embodiment, at least a portion of the labeled protein may be synthetically prepared using any appropriate method as will be known to a person skilled in the art.

[0075] In yet another embodiment, at least a portion of the labeled protein may be derived from a labeled animal. In a further embodiment, the animal may be a mouse.

[0076] In yet another embodiment, at least a portion of the labeled protein may be derived from a human cell culture, such as a human muscle cell line (i.e. myotubes) culture.

[0077] In certain embodiments, a labeled animal may be a custom “heavy” mouse colony, termed SILAM or SILAC Mouse (stable isotopic labeling by amino acid in a mouse/mammal). In an embodiment, the SILAM or SILAC Mouse may be generated by feeding mice a custom diet containing ¹³C6-Lysine at 1%. In one embodiment, a pregnant dam may be fed with ‘heavy’ diet until a litter (F1 generation) is obtained and continued through weaning of the pups. After weaning, the pups may be continued on ‘heavy’ diet through breeding and generation of a F2 litter. Label incorporation may be monitored for specific organs and specific proteins by mass spectrometry. In some non-limiting embodiments, labeling efficiency may be better than 96% by F2 generation, including skeletal muscle. Other metabolic labeling method of mouse include feeding with ¹⁵N labeled Spirulina where all the nitrogen attoms in a protein are replaced with heavy nitrogen atoms “¹⁵N”

[0078] In yet another embodiment, the biological sample may be extracted protein from a biopsied tissue. Extraction may be performed using any appropriate method as will be known to one of skill in the art. In a non-limiting embodiment, the protein may be extracted using RIPA buffer (ThermoScientific) or a modified Laemmli sample buffer containing 10% SDS (10% SDS, 75 mM Tris-HCl, pH 6.8, 10 mM EDTA, 20% glycerol, 50 mM DTT). In some embodiments, the SDS-containing buffer may be preferable.

[0079] In certain embodiments, gel electrophorsis, or other appropriate protein separationtechniques known to those skilled in the art such as capillary electrophoresis, HPLC, FPLC, or other methods may be used to separate a biological sample based on weight, size, shape, charge, or other propery.

[0080] In some embodiments, the protein from the biological sample may be digested or fragmented using any appropriate technique as will be known to those skilled in the art. By way of example, a trypsin digestion, which may be an in-gel trypsin digestion, may be performed to digest protein in the biological sample.

[0081] In a further embodiment, the biological sample may be spiked with labeled protein/peptide post-digestion. In an alternative embodiment, the biological sample may be spiked with labeled protein/peptide pre-digestion. In a further embodiment, the biological sample may be spiked with a known quantity of labeled protein and/or peptide.

[0082] In certain embodiments of a method provided herein, the biological sample spiked with labeled protein and/or peptide may be analyzed by mass spectrometry. In some embodiments, mass spectrometry may be used to identify peptide fragments, and corresponding labeled peptide fragments, from a protein of interest. In some embodiments, the identified labeled and unlabeled peptide pairs may be selected as candidate peptide markers for a protein of interest. In additional emobodiments, the labeled and unlabeled peptide pairs detected using mass spectrometry may be used to quantitate one or more proteins in a biological sample.

[0083] A wide variety of mass spectrometry (MS) techniques are known in the art, and the extracted samples may be analyzed using any suitable method known in the art. For example, and without wishing to be limiting in any manner, extracts of biological samples are amenable to analysis on essentially any mass spectrometry platform, either by direct injection or following chromatographic separation. Chromatographic separation may involve, by way of example, reverse phase (for example, C18) chromatography, or any other appropriate technique as will be known to those of skill in the art. Typical mass spectrometers are comprised of a source which ionizes molecules within the sample, and a detector for detecting the ionized molecules or fragments of molecules. Non-limiting examples of common sources include electron impact, electrospray ionization (ESI), atmospheric pressure chemical ionization (APCI), atmospheric pressure photo ionization (APPI), matrix assisted laser desorption ionization (MALDI), surface enhanced laser desorption ionization (SELDI), and derivations thereof. Common mass separation and detection systems can include quadrupole, quadrupole ion trap, linear ion trap, time-of-flight (TOF), magnetic sector, ion cyclotron (FTMS), Orbitrap, Q Exactive, and derivations and combinations thereof. In some non-limiting embodiments, MS analysis may be performed using one or both of LTQ-Orbitrap-XL and/or Q Exactive analysis.

[0084] In an embodiment, analysis of mass spectrometry data, for example to identify peptide fragments from a protein of interest, may be performed. Analysis may be assissted using, for example, computer software, or any other appropriate technique as will be known to one skilled in the art. Examples of analysis software may include Sequest in the Biowords Browser software (Thermo), Proteome Discoverer 1.3 (ThermoFisher Scientific), Skyline Targeted Proteomics (developed by MacCoss lab/https://skyline.gs.washington.edu/labkey/project/home/software/Skyline/begin.view) and Pinpoint software. MS/MS techniques, or tandem mass spectrometry, which may involve a fragmentation step, may be used during MS sample analysis, and may provide additional peptide fragments and/or data useful for the methods provided herein.

[0085] Without wishing to be bound by theory, a protein of interest may be quantified according to an embodiment of a method described herein by comparing the signal intensity of one or more peptide fragments of a protein of interest from a biological sample to corresponding labeled peptide fragments, which may be present in the sample in known amounts. In some non-limiting embodiments, a titration or standard curve may be generated to assist in quantification and to determine limits of detection.

[0086] In some embodiments, the protein of interest from the biological sample may be a protein linked to a particular disease. For example, the protein of interest to be quantified may be dystrophin, and the associated disease may be DMD. As will be recognized by those skilled in the art, any of a wide variety of proteins may be quantitated using methods as provided herein, many of which may be linked to a disease or other physiological condition. In some embodiments, a method as provided herein may be used to determine changes in protein levels as a result of disease progression, changes in protein levels as a result of treatment with a drug, or changes in protein levels as a result of other changes affecting a patient.

[0087] Those skilled in the art will recognize that a variety of mass spectrometric analysis techniques and instruments may be used to carry out embodiments of the methods provided herein. The examples provided herein are for illustrative purposes, and are not intended to be limiting in any way.

[0088] The following examples are provided for the purposes of illustration, and may demonstrate embodiments of at least some of the methods provided herein.

### EXAMPLE 1

### Materials and Methods

### Muscle Biopsies

[0089] All human muscle biopsies used in this study were previously banked in a laboratory in accordance with an Institutional Review Board approved protocol at Children's National Medical Center (CNMC) and after obtaining patients written informed consent. Only excess specimens after diagnosis were used. Diagnosis was previously performed at the Center for Genetic Medicine at Children's National Medical Center. Banked specimens were deidentified and only age, gender, diagnosis and phenotype were reported. Total protein extracts of muscle biopsies from healthy subjects were obtained from Dr. David Rowlands at Massey University, Wellington, New Zealand.

### Custom Peptides

[0090] Custom dystrophin peptides LLDLLEGLTGQK (SEQ ID NO: 937), LLVEELPLR (SEQ ID NO: 6453), IFLTEQPLEGLEK (SEQ ID NO: 6441) and filamin c peptide VYNVTYTVK (SEQ ID NO: 2830) with 13C6-15N2-Lysine and 13C6-15N4-Arginine were purchased from New England Peptide (Gardner, MA). Peptides were suspended in 50% molecular grade acetonitrile containing 0.1% TFA and spiked into samples prior to mass spectrometric analyses.

### SILAM/SILAC Mouse

[0091] Custom “heavy” C57BL6 mice, termed SILAM or SILAC Mouse (stable isotopic labeling by amino acid in a mouse/mammal) were generated in-houseand handled according to Institutional Animal Care and Use Committee guidelines at the Children's National Medical Center. Mice were fed a custom diet containing 13C6-Lysine (Cambridge Isotope Laboratories, Andover, Mass.) at 1%, adhering to laboratory mouse nutritional standards. A pregnant dam was fed with ‘heavy’ diet until a litter (F1 generation) was obtained and continued through weaning of the pups. After weaning, the pups were continued on ‘heavy’ diet through breeding and generation of a F2 litter. Label incorporation was monitored for specific organs and specific proteins by mass spectrometry. Labeling efficiency was better than 96% by F2 generation, including skeletal muscle [8]. This labeling efficiency was similar to labeling efficiencies obtained by others [9]. SILAC labeled skeletal muscles were harvested, flash frozen in liquid nitrogen chilled isopentane and stored at −80° C. until analysis as previously described [8].

### Muscle Protein Preparation

[0092] Approximately 50 serial sections were prepared from each of the human muscle biopsies and SILAC mouse gastrocnemius muscle using a cryostat set at 10 μm thickness. Muscle sections were directly placed into a microcentrifuge tube on dry ice. Total protein extraction from the muscle samples was performed using a handheld homogenizer either in a RIPA buffer (ThermoScientific) or a modified Laemmli sample buffer containing 10% SDS (10% SDS, 75 mM Tris-HCl, pH 6.8, 10 mM EDTA, 20% glycerol, 50 mM DTT) [10].Protein concentration was determined using a BCA assay (Pierce, Thermo Scientific).

Dystrophin Quantitation using Mass Spectrometry with Stable Isotope Spike-In Strategy

[0093] Two approaches were evaluated to quantitate dystrophin in skeletal muscle extracts (FIG. 1). In the first approach, called post-digestion spike-in approach hereafter, aliquots of 50 μg total protein from each muscle extract was diluted in LDS buffer (Invitrogen, Carlsbad, Calif.) and further fractionated by SDS-PAGE on a 3-8% Tris-Acetate midi gel (Invitrogen) for 1 hour at 160 V. Gels were stained with BioSafe commassie (BioRad) for 1 hour. The upper section of the gel (300 to 450 kDa) containing dystrophin protein and other skeletal muscle proteins was excised and processed for in-gel digestion as previously described [11] using proteomics grade trypsin (Promega, Madison, Wis.). Peptides were extracted from the gel and spiked with known amounts (14 nM, 40 nM, 80 nM and 160 nM) of custom synthesized stable isotope labeled dystrophin peptides as well as an internal control filamin c peptide. In the second approach, called pre-digestion spike-in approach hereafter, aliquots of 50 μg of total protein from each muscle extract were spiked with 25 μg of muscle extract prepared from 13C6-Lysine labeled SILAC mouse. The mixture was then fractionated by SDS-PAGE on a 3-8% Tris-Acetate gel and gel bands in the 300-450 kDa were processed as above. To determine the limit of detection (LOD) and limit of quantitation (LOQ) of dystrophin protein in a complex muscle extract we used a muscle extract from a DMD patient, completely lacking dystrophin protein, and mixed at different ratios with a muscle extract from a healthy donor that expresses dystrophin as follows: DMD to normal 100%/0%, 95%/5%, 90%/10%, 75%/25%, 50%/50%, 25%/75%, 10%/90%, 5%/95%, 0%/100%. The final protein content in each mixture was kept constant at 50 μg. Each sample was then spiked with 25 μg of muscle extract prepared from 13C6-Lys labeled SILAM mouse to quantitate human dystrophin. Samples were analyzed using two different types of mass spectrometry instruments. For analysis by LTQ-Orbitrap-XL (Thermo), concentrated peptides from each spiked sample above were dissolved in 10 μL of 0.1% TFA solution and 6 μL was injected via an autosampler onto a Symmetry C18 trap column (5 μm, 300 μm i.d., 23 mm, Waters) for 10 min at a flow rate of 10 μm/min, 100% A. The sample was subsequently separated by a C18 reverse-phase column (3 μm, 200A, 100 μmx×15 cm, Magic C18, Michrom

[0094] Bioresources) at a flow rate of 330 nL/min using an Eksigent nano-hplc system (Dublin, Calif.). The mobile phases consisted of water with 0.1% formic acid (A) and 90% acetonitrile (B). A 65 minute linear gradient from 5 to 40% B was employed. Eluted peptides were introduced into the mass spectrometer via a Michrom Bioresources CaptiveSpray. The spray voltage was set at 1.4 kV and the heated capillary at 200° C. The LTQ-Orbitrap-XL was operated in data-dependent mode with dynamic exclusion in which one cycle of experiments consisted of a full-MS in the Orbitrap (300-2000 m/z) survey scan in profile mode, resolution 30,000, and five subsequent MS/MS scans in the LTQ of the most intense peaks in centroid mode using collision-induced dissociation with the collision gas (helium) and normalized collision energy value set at 35%.

[0095] For Q Exactive analysis, concentrated peptides from each spiked sample above were redissoleved in 20 μL of 90:10 water:acetonitrile with 0.1% TFA containing 2.5 fmol/μL of trainer peptide mixture. Sample were then injected via autosampler followed by separation on a

[0096] HALO C18 column (75 μm ID, 10 cm, 2.7 μm) with a gradient of 0 to 35% (A: 0.1% formic acid water, B: 0.1% formic acid acetonitrile) at a flow rate of 400 nL/min on a Thermo Scientific Easy 1000 connected to a nanoESl flex source. For the peptide coverage discovery experiment, the Q Exactive was operated with a full scan (380-1500 m/z) at 70,000 resolution followed by MS/MS of the top ten most abundant ions at 17,500 resolution. For quantitative acquisition, the Q Exactive was operated with a full scan (380-1500 m/z) at 35,000 resolution followed by timed targeted MS/MS of dystrophin and internal stable isotope labeled standard peptides at 35,000 resolution.

### Protein Identification and Quantitation

[0097] LTQ-Orbitrap XL Raw files were searched using Sequest in the Bioworks Browser (Thermo) software against a tryptic human database with 2 missed cleavages, 50 ppm mass accuracy, 1.5 Da fragment mass tolerance. Spiked peptides were identified and elution times documented. Dystrophin was quantitated by comparing the unlabeled to the spiked-in heavy isotope profile for each peptide. Q Exactive Raw files were searched with Proteome Discoverer 1.3 (ThermoFisher Scientific) using SEQUEST and the human refseq. Database (release 47, ftp://ftp.ncbi.nih.gov/refseq/H_sapiens/mRNA_Prot/, with 34,340 entries). Search parameters allowed trypsin to cleave after Lysine and Arginine with 2 missed cleavages. Precursor ion mass tolerance was set to 10 ppm and fragment ion mass tolerance was 20 ppm. The dynamic modification of methionine (oxidation=15.995 Da) and lysine (13C6=6.020 Da), was accepted on up to 4 residues per peptide. Within the Proteome Discoverer Software, SILAC pairs were identified using the “2 plex” workflow node, and all peptides were rescored using the Percolator algorithm node. Finally, peptides were filtered at 1% FDR. SILAC quantification from 25% and 75% normal were compared and proteins showing a consistent ratio were considered as controls. Peak areas and area ratios were calculated with Pinpoint software using recreated ion chromatograms at 25 ppm from the full scan MS/MS. The ratios of the integrated areas for endogenous peptides and [13C6 lys] labeled peptides were calculated to obtain peptide measures using multiple y-ion fragments per peptide. The average of these peptide ratios determined the relative amount of each protein.

High SDS Containing Buffer Enabled Efficient Dystrophin Extraction from Skeletal Muscle Biopsies.

[0098] Dystrophin protein is a low abundant protein, accounting for only 0.002% of total muscle protein. Since no amplification technologies exist for protein detection by mass spectrometry, efficient dystrophin extraction was essential. In addition to efficient extraction, enrichment of dystrophin protein from other more abundant muscle proteins prior to mass spectrometry was required in order to reduce the sample dynamic range and thereby ensure consistent detection of dystrophin. We evaluated a mild (RIPA buffer) and strong (10% SDS) buffer for muscle protein extraction. As expected the 10% SDS modified Laemmli buffer extracted approximately 10 times more total protein than the RIPA buffer from the same amount of muscle tissue. Indeed, about 8 μg and 54 μg of total proteins were extracted from 1 mg of fresh muscle tissue using RIPA and 10% SDS modified Laemmli buffer, respectively. The increased extraction efficiency of the SDS buffer also increased the dynamic range of the sample by extracting more of the highly abundant skeletal muscle proteins such as myosins, titin and nebulin. To overcome the dynamic range limitations, total muscle extract from each of the RIPA and SDS preparation was further separated on a 3-8% Tris-Acetate gel. The region on the gel corresponding to the migration zone of dystrophin and/or truncated Becker-like dystrophin (300-450 kDa) was excised, and processed for mass spectrometry analysis as described above. Dystrophin protein was identified by 19 and 50 peptides when muscle sample was extracted with RIPA and 10% SDS modified Laemmli buffers, respectively (Table 1).

TABLE 1

| | # of missed | |
|---|---|---|
| Peptide | cleavages | SEQ ID NO: |
| IFLTEQPLEGLEK | 0 | 6441 |
| QLGEVASFGGSNIEPSVR | 0 | 6442 |
| VLSQIDVAQK | 0 | 6443 |
| TLNATGEEIIQQSSK | 0 | 6444 |
| VLSQIDVAQK | 0 | 6445 |
| SLEGSDDAVLLQR | 0 | 6446 |
| LLEQSIQSAQETEK | 0 | 6447 |
| QLNETGGPVLVSAPISPEEQDKLENK | 1 | 6448 |
| LQELQEATDELDLK | 0 | 6449 |
| VLQEDLEQEQVR | 0 | 6450 |
| TKEPVIMSTLETVR | 1 | 6451 |
| ASIPLKELEQFNSDIQK | 1 | 6452 |
| LLVEELPLR | 0 | 6453 |
| VLM*DLQNQK | 0 | 6454 |
| VM*VGDLEDINEMIIK | 0 | 6455 |
| LGLLLHDSIQIPR | 0 | 6456 |
| VAAAETAKHQAK | 1 | 6457 |
| LLQVAVEDRVR | 1 | 6458 |
| IFLTEQPLEGLEKLYQEPR | 1 | 6459 |
| HAQEELPPPPPQK | 0 | 6460 |
| VLSQIDVAQKK | 1 | 6461 |
| LLRDYSADDTR | 1 | 6462 |
| QAPIGGDFPAVQK | 0 | 6463 |
| RPQLEELITAAQNLK | 0 | 6464 |
| VHALNNVNK | 0 | 6465 |
| VM*VGDLEDINEM*IIKQK | 1 | 6466 |
| QITVDSEIRK | 1 | 6467 |
| SDSSQPM*LLR | 0 | 6468 |
| QAEGLSEDGAAM*AVEPTQIQLSKR | 1 | 6469 |
| LLDLLEGLTGQKLPK | 1 | 6470 |
| QASEQLNSR | 0 | 6471 |
| ELPPEERAQNVTR | 1 | 6472 |
| LLDLLEGLTGQKLPKEK | 2 | 6473 |
| GDNLQQR | 0 | 6474 |
| KLQDASR | 1 | 6475 |
| SPAQILISLESEERGELER | 1 | 6476 |
| FAAISHR | 0 | 6477 |
| KLQDVSM*K | 1 | 6478 |
| LQDVSM*KFR | 1 | 6479 |
| KMEEEPLGPDLEDLKR | 2 | 6480 |
| DYSADDTR | 0 | 6481 |
| TIITDRIER | 1 | 6482 |
| HSEDNPNQIR | 0 | 6483 |
| IQSDLTSHEISLEEMKK | 1 | 6484 |
| LYQEPR | 0 | 6485 |
| ASIPLKELEQFNSDIQK | 1 | 6486 |
| LRQLLEQPQAEAK | 1 | 6487 |
| DYSADDTRK | 1 | 6488 |
| ELPPEER | 0 | 6489 |
| NKTSNQEAR | 1 | 6490 |
| ATM*QDLEQR | 0 | 6491 |
| DQAANLM*ANR | 0 | 6492 |
| TAALQSATPVER | 0 | 6493 |
| QLLEQPQAEAK | 0 | 6494 |
| EEAEQVLGQAR | 0 | 6495 |
| ELEQFNSDIQK | 0 | 6496 |
| ILADLEEENR | 0 | 6497 |
| VGNILQLGSK | 0 | 6498 |
| SAVEGM*PSNLDSEVAWGK | 0 | 6499 |
| LLVSDIQTIQPSLNSVNEGGQK | 0 | 6500 |

### Dystrophin Quantitation by Mass Spectrometry

[0099] Two approaches to quantitate dystrophin protein in total muscle protein extracts were evaluated(Figure 1): (i) Post-Digestion spike-in approach with stable isotope labeled custom synthesized standard dystrophin peptides; and (ii) Pre-Digestion spike-in approach with stable isotope labeled mouse muscle protein extract prior to gel separation and in-gel digestion.

### Post-Digestion Spike-In Approach

[0100] For the post-digestion spike-in approach, three stable isotope labeled dystrophin peptides were custom synthesized. The sequences of these peptides were chosen based on their consistent and reproducible detection by LC-MS/MS following in-gel digestion of SDSPAGE fractionated muscle extracts, different retention times, amino acid content (e.g. absence of highly modifiable residues such as cysteine and methionine), as well as the location within the dystrophin sequence (e.g. distributed throughout the N-terminal, middle and C-terminal domain). Additionally, a stable isotope labeled peptide for filamin c was also custom synthesized and used as an internal standard. The sequences of the standard peptides, their retention time, observed molecular masses as well as their location within the dystrophin sequence were determined. First the post-digestion spike-in approach was optimized for the amount of stable isotope labeled standard peptides to be used for spike-in. In-gel digested dystrophin containing bands were prepared from replicate SD S-PAGE fractionation of 50 μg of muscle protein extracts of a healthy donor and spiked with varying amounts of stable isotope labeled standard peptides (14 nM, 40 nM, 80 nM and 160 nM). FIG. 2 shows MS spectra of the unlabeled peptide from the endogenous dystrophin and its corresponding heavy stable isotope spiked-in standard at varying concentrations. From this preliminary study, the optimal amount of stable isotope labeled peptides to spike-in ranged between 14 and 40 nM. Spiking amounts below 14 nM resulted in poor signal to noise spectra while spiking amounts above 40 nM resulted in increased dynamic range between the standard peptide and the endogenous peptide ion intensities reducing the linear range for quantitation. To test the reproducibility of the post-digestion spike-in approach, triplicate extraction experiments performed on the same muscle biopsy obtained from a healthy donor were processed and spiked with an optimal amount of 30 nM of stable isotope labeled standard peptide mixture. FIG. 3 shows the reproducibility of the triplicate assay with a CV of less than 7%. Unfortunately, the reproducibility of the experiment did not hold across the three different dystrophin targeted peptides for a titration curve of endogenous dystrophin protein including the internal control protein filamin c (FIG. 4). This was attributed to the inherent variability of in-gel digestion. Therefore, the post-digestion spike-in approach suffered from high sample handling errors.

### Pre-Digestion Spike-In Approach

[0101] In order to overcome in-gel digestion variability a pre-digestion spike-in approach was evaluated using 13C6-Lysine fully labeled dystrophin protein obtained from muscle extracts prepared from a SILAC mouse. In this method the sample is spiked at the protein level prior to electrophoresis and in-gel digestion, thus minimizing variation due to sample handling and greatly improving reproducibility. Since production of a fully labeled human dystrophin protein using transfection technology and over-expression in a labeled culture system was challenging due to the low transfection rate of the largest human gene [12], use of 13C6-Lysine labeled dystrophin prepared from a SILAC mouse was employed [9,13]. Mouse dystrophin and human dystrophin have 91% sequence homology. Previously a fully 13C6-Lysine labeled SILAC mouse had been generated [8]. Skeletal muscle from the SILAC mouse was sectioned by cryostat, total protein containing 0.002% of fully labeled dystrophin were extracted using the 10% SDS modified Laemmli buffer then used as a spike-in standard in human muscle extracts. Spiked human muscle extracts were further fractionated by SDS-PAGE and processed for mass spectrometry analysis using the Q Exactive instrument as described above. In a discovery run, 43 unique dystrophin peptides were detected with good coverage throughout the entire dystrophin sequence. Of these 43 unique peptides, five terminated in lysine and had 100% sequence homology with mouse tryptic peptides and therefore were used to quantitate dystrophin in human muscle extracts. In addition to these dystrophin overlapping peptides between human and mouse, other lysine terminating peptides belonging to several other skeletal muscle proteins also had 100% sequence homology between human and mouse. This enabled the evaluation and selection of appropriate internal standards for accurate dystrophin quantitation.

### Limit of Detection and Limit of Quantitation of Dystrophin Protein in Total Muscle Extract

[0102] To evaluate the LOD and LOQ of the pre-digestion spike-in approach, targeted mass spectrometry analysis was used on the five dystrophin peptides detected above as well as a few internal control peptides from myomesin and filamin c. Dystrophin protein was targeted for quantitation in the following combination of normal and DMD muscle extracts: 0%/100%, 5%/95%, 10%/90%, 25/75%, 50/50%, 75/25%, 90/10%, 95/5%, 100/0%. Each mixture had a final protein content of 50 μg. The range of dystrophin protein expression, from 0% to 100% of normal, is thus artificially generated to represent possible amounts of dystrophin protein in Becker patients or in Duchenne patients receiving treatments aiming to restore dystrophin expression [3-7]. Each combination mixture above (50 μg final total protein) was then spiked with SILAC 13C6-Lysine labeled SILAC mouse muscle extract (25 μg). Samples were fractionated on a 3-8% Tris-Acetate gel, bands in the dystrophin protein region (300-450 kDa) were excised, in-gel digested and analyzed by LC-MS/MS on a Q Exactive mass spectrometer using a timed targeted MS/MS method. Unlabeled and labeled dystrophin, filmain c and myomesin peptides from both the human muscle extract and the spike-in SILAC mouse labeled extract were targeted for MS/MS analysis. Selected transition ions were used for quantitation in each sample. The average ratio of labeled to unlabeled peptide intensities for dystrophin, filamin c and myomesin were plotted against the different muscle combination mixtures resulting in a calibration curve with an R2 of 0.99 (FIG. 5). While the amount of dystrophin increased with increasing % of normal muscle extract in the mixtures, two muscle specific proteins, filamin c and myomesin, remained relatively unchanged. These two proteins are therefore ideal candidates as internal controls. Note that filamin c and myomesin did show a slight increase in abundance as the % of normal increased (FIG. 5), and this is expected since the amount of muscle present in dystrophic tissue is slightly decreased and is replaced by fibrotic tissue (e.g. hallmark of DMD pathogenesis) [14]. Therefore, monitoring of internal standards across the curve allows for improved accuracy and normalization.

### Absolute Quantitation of Dystrophin in Becker Muscular Dystrophy Patients

[0103] The absolute amount of dystrophin in muscle biopsies from normal donors (n=12) and Becker muscular dystrophy patient donors (n=5) was determined. Dystrophin in normal muscle ranged from 0.001 to 0.004% of total striated muscle, consistent with previous findings [2]. The Becker samples also showed a wide range of dystrophin expression at approximately 10% of the level found in normal muscle (FIG. 6). Dystrophin protein represents approximately 0.002% of total striated muscle protein and since the amount of spike-in standard is known, we estimated the total amount of dystrophin in healthy individuals to be 75±15 ng per mg of muscle while in Becker patients the amount can range from 0 to 7 ng per mg of muscle (FIG. 6).

### Extension of Mass Spectrometry SILAC Methods to Multiple Proteins.

[0104] The methods for quantitation of dystrophin, where alignments of peptides showing 100% homology between mouse SILAC skeletal muscle tissue proteins and human skeletal muscle tissue proteins, was extended to a survey of all paired mouse/human peptides (Tables 3-6). Muscle proteins were extracted using two different solubilization buffers (RIPA, SDS), fractionated on SDS-PAGE gels, mouse and human muscle samples mixed (as described above) and gel fragments subjected to trypsin digestion with detection of 100% conserved peptides on the Q-exactive mass spectrometer (Table 2; Table S2 [spreadsheet]).

TABLE 2

| | RIPA | RIPA | SDS | SDS |
|---|---|---|---|---|
| | Normal | DMD | Normal | DMD |
| Number of | 2,428 | 2,281 | 4,400 | 2,513 |
| paired | | | | |
| mouse/human | | | | |
| peptides | | | | |
| identified | | | | |

[0105] From this data generation, between 2,281 to 4,400 100% homologous mouse/human peptide pairs were identified, enabling accurate quantitation of 1,172 proteins from skeletal muscle (Table 7). By extension, similar data would be expected to be obtained from any other mixed human—mouse SILAC tissue pair, resulting in the ability to quantitate a wide range of human proteins from a wide range of clinical tissue samples.

Lengthy table referenced here
US20150168425A1-20150618-T00001
Please refer to the end of the specification for access instructions.

Lengthy table referenced here
US20150168425A1-20150618-T00002
Please refer to the end of the specification for access instructions.

Lengthy table referenced here
US20150168425A1-20150618-T00003
Please refer to the end of the specification for access instructions.

Lengthy table referenced here
US20150168425A1-20150618-T00004
Please refer to the end of the specification for access instructions.

Lengthy table referenced here
US20150168425A1-20150618-T00005
Please refer to the end of the specification for access instructions.

Extension of Mass Spectrometry Human Cell Culture (i.e. Human Muscle Cell Culture, Such as Myotube Cell Culture) Methods to Multiple Proteins.

[0106] The methods for quantitation of dystrophin, where alignments of peptides showing 100% homology between mouse SILAC skeletal muscle tissue proteins and human skeletal muscle tissue proteins, and the extension described above to a survey of all paired mouse/human peptides (Tables 3-6), may also be extended to methods using a labeled sample obtained from human cell culture, such as a human muscle cell culture, or a human myotube culture. Labeled standard made in human myotube culture may be used to survey a substantial number of proteins expressed in human myotube cells using methods similar to those previously described.

[0107] As shown in Table 8, about 3704 proteins expressed by myotubes may be surveyed, detected, and/or quantitated using methods similar to those described above. By extension, similar data would be expected to be obtained from any other labeled human cell line culture and corresponding biological sample of interest, resulting in the ability to quantitate a wide range of human proteins from a wide range of clinical tissue samples.

Lengthy table referenced here
US20150168425A1-20150618-T00006
Please refer to the end of the specification for access instructions.

### Modifications and Other Embodiments

[0108] Various modifications and variations of the described mouse/human paired peptide quantitation methods, and human cell culture/human quantitation methods, and methods of their use as well as the concept of the invention will be apparent to those skilled in the art without departing from the scope and spirit of the invention. Although the invention has been described in connection with specific preferred embodiments, it should be understood that the invention as claimed is not intended to be limited to such specific embodiments. Various modifications of the described modes for carrying out the invention which are obvious to those skilled in the medical, biological, molecular biological, chemical or pharmacological arts or related fields are intended to be within the scope of the following claims.

### Incorporation by Reference

[0109] Each document, patent, patent application or patent publication cited by or referred to in this disclosure is incorporated by reference in its entirety, especially with respect to the specific subject matter surrounding the citation of the reference in the text. However, no admission is made that any such reference constitutes background art and the right to challenge the accuracy and pertinence of the cited documents is reserved.

### REFERENCES

[0110] 1. Atkinson, Arthur J., Wayne A. Colburn, Victor G. DeGruttola, David L. DeMets, Gregory J. Downing, Daniel F. Hoth, John A. Oates et al. “Biomarkers and surrogate endpoints: Preferred definitions and conceptual framework*.” Clinical Pharmacology & Therapeutics 69, no. 3 (2001): 89-95.

[0111] 2. Hoffman E P, Brown R H Jr, Kunkel L M. Dystrophin: the protein product of the Duchenne muscular dystrophy locus. Cell. 1987; 51:919-928.

[0112] 3. Sebahattin C, Virginia A, Michela G, Lucy F, Silvia T, et al. Exon skipping and dystrophin restoration in patients with Duchenne muscular dystrophy after systemic phosphorodiamidate morpholino oligomer treatment: an open-label, phase 2, dose-escalation study. Lancet. 2011; 378:595-605.

[0113] 4. Finkel R S. Read-through strategies for suppression of nonsense mutations in Duchenne/Becker muscular dystrophy: aminoglycosides and ataluren (PTC124). J Child Neurol. 2010; 25:1158-1164.

[0114] 5. Nelson S F, Crosbie R H, Miceli M C, Spencer M J. Emerging genetic therapies to treat Duchenne muscular dystrophy. Curr Opin Neurol. 2009; 22:532-538.

[0115] 6. Hoffman E P, Bronson A, Levin A A, Takeda S, Yokota T, et al. Restoring dystrophin expression in duchenne muscular dystrophy muscle progress in exon skipping and stop codon read through. Am J Pathol. 2011; 179:12-22. [

[0116] 7. Goemans N M, Tulinius M, van den Akker J T, Burm B E, Ekhart P F, et al. Systemic administration of PRO051 in Duchenne's muscular dystrophy. N Engl J Med. 2011; 364:1513-1522.

[0117] 8. Sharma N, Medikayala S, Defour A, Rayavarapu S, Brown K J. Use of quantitative membrane proteomics identifies a novel role of mitochondria in healing injured muscles. J Biol Chem. 2012; 287:30455-30467.

[0118] 9. Kruger M, Moser M, Ussar S, Thievessen I, Luber C A, et al. SILAC mouse for quantitative proteomics uncovers kindlin-3 as an essential factor for red blood cell function. Cell. 2008; 134:353-364.

[0119] 10. Hoffman E P, Fischbeck K H, Brown R H, Johnson M, Medori R, et al. Characterization of dystrophin in musclebiopsy specimens from patients with Duchenne's or Becker's muscular dystrophy. N Engl J Med. 1988; 318:1363-1368.

[0120] 11. Jensen O N, Wilm M, Shevchenko A, Mann M. Sample preparation methods for mass spectrometric peptide mapping directly from 2-DE gels. Methods Mol Biol. 1999; 112:513-530.

[0121] 12. Tennyson C N, Klamut H J, Worton R G. The human dystrophin gene requires 16 hours to be transcribed and is cotranscriptionally spliced. Nat Genet. 1995; 9:184-190.

[0122] 13. McClatchy, D B.; Yates, J R, III. Stable Isotope Labeling of Mammals (SILAM). 2008.

[0123] 14. Ardite E, Perdiguero E, Vidal B, Gutarra S, Serrano A L, et al. PAI-1-regulated miR-21 defines a novel age-associated fibrogenic pathway in muscular dystrophy. J Cell Biol. 2012; 196:163-175.

[0124] 15. Lederfein D, Levy Z, Augier N, Mornet D, Morris G et al., A 71-kilodalton protein is a major product of the Duchenne muscular dystrophy gene in brain and other nonmuscle tissues. Proc Natl Acad Sci. 1992; 89:5346-5350.

[0125] 16. van Essen A J, Busch H F M, to Meerman G J, ten Kate L P. Birth and population prevalence of Duchenne muscular dystrophy in The Netherlands. Hum Genet 1992; 88:258-266.

[0126] 17. Bushby K M D, Gardner-Medwin D, Nicholson L V B, Johnson M A, Haggerty I D et al., The clinical, genetic and dystrophin characteristics of Becker muscular dystrophy. J Neurol. 1993; 240:105-112.

[0127] 18. Anthony K, Sebahattin C, Silvia T, Giorgio T, Lucy F et al., Dystrophin quantification and clinical correlations in Becker muscular dystrophy; implications for clinical trials. Brain. 2011; 134:3547-3559.

[0128] 19. Yokota T, Lu Q L, Partridge T, Kobayashi M, Nakamura A et al., Efficacy of systemic morpholinon exon skipping in Duchenne dystrophy dogs. Ann Neurol. 2009; 65:667-676.

[0129] 20. Lu Q L, Yokota T, Takeda S, Garcia L, Muntoni F et al. The status of exon skipping as a therapeutic approach to Duchenne muscular dystrophy. Mol Ther. 2011; 19:9-15.

LENGTHY TABLES
The patent application contains a lengthy table section. A copy of the table is available in electronic form from the USPTO web site (http://seqdata.uspto.gov/?pageRequest=docDetail&DocID=US20150168425A1). An electronic copy of the table will also be available from the USPTO upon request and payment of the fee set forth in 37 CFR 1.19(b)(3).

The application's sequence listing, which the Patent Office published only in electronic form, follows.

SEQUENCE LISTING (6502 sequences)

SEQ ID NO: 1 - protein, 24 aa, Homo Sapien
VIDAHLDSQTQNFQQTQIQTAESK

SEQ ID NO: 2 - protein, 10 aa, Homo Sapien
WLFENQPIDK

SEQ ID NO: 3 - protein, 12 aa, Homo Sapien
YVFENTNDSSQK

SEQ ID NO: 4 - protein, 13 aa, Homo Sapien
SEALGDILQVAVK

SEQ ID NO: 5 - protein, 14 aa, Homo Sapien
AVVVGFDPHFSYMK

SEQ ID NO: 6 - protein, 10 aa, Homo Sapien
LGFITNNSSK

SEQ ID NO: 7 - protein, 16 aa, Homo Sapien
SLYYYIQQDTKGDYQK

SEQ ID NO: 8 - protein, 8 aa, Homo Sapien
KLMVALAK

SEQ ID NO: 9 - protein, 10 aa, Homo Sapien
DALNIETAIK

SEQ ID NO: 10 - protein, 18 aa, Homo Sapien
LSLEGDHSTPPSAYGSVK

SEQ ID NO: 11 - protein, 16 aa, Homo Sapien
SALSGHLETVILGLLK

SEQ ID NO: 12 - protein, 11 aa, Homo Sapien
SLYYYIQQDTK

SEQ ID NO: 13 - protein, 11 aa, Homo Sapien
TPAQYDASELK

SEQ ID NO: 14 - protein, 14 aa, Homo Sapien
IMDANYFGPITLTK

SEQ ID NO: 15 - protein, 13 aa, Homo Sapien
VVVITDAISGLGK

SEQ ID NO: 16 - protein, 13 aa, Homo Sapien
EAEEKESTLASEK

SEQ ID NO: 17 - protein, 15 aa, Homo Sapien
AINEGPPTESGKQEK

SEQ ID NO: 18 - protein, 10 aa, Homo Sapien
AAGAAIGGVK

SEQ ID NO: 19 - protein, 15 aa, Homo Sapien
FFPDAFDYAELDPAK

SEQ ID NO: 20 - protein, 28 aa, Homo Sapien
LSEDGTTVSPAADNPEMSGGGAPAEETK

SEQ ID NO: 21 - protein, 14 aa, Homo Sapien
GLAITFVSDENDAK

SEQ ID NO: 22 - protein, 17 aa, Homo Sapien
QSTSFLVLQEILESEEK

SEQ ID NO: 23 - protein, 10 aa, Homo Sapien
VAASIGNAQK

SEQ ID NO: 24 - protein, 28 aa, Homo Sapien
VITNQYNNPAGLYSSENISNFNNALESK

SEQ ID NO: 25 - protein, 16 aa, Homo Sapien
DGTIDFTPGSELLITK

SEQ ID NO: 26 - protein, 15 aa, Homo Sapien
LLQSNPVLEAFGNAK

SEQ ID NO: 27 - protein, 18 aa, Homo Sapien
VLQALGSEPIQYAVPVVK

SEQ ID NO: 28 - protein, 10 aa, Homo Sapien
HLGYKPEEYK

SEQ ID NO: 29 - protein, 13 aa, Homo Sapien
LQEVIETLLSLEK

SEQ ID NO: 30 - protein, 22 aa, Homo Sapien
LGSLIGLIVEEGEDWKHVEIPK

SEQ ID NO: 31 - protein, 17 aa, Homo Sapien
ILMPSLSPTMEEGNIVK

SEQ ID NO: 32 - protein, 15 aa, Homo Sapien
QMPDVNVSWDGEGPK

SEQ ID NO: 33 - protein, 10 aa, Homo Sapien
GIQEIADSVK

SEQ ID NO: 34 - protein, 12 aa, Homo Sapien
EGFVEYTEQVVK

SEQ ID NO: 35 - protein, 14 aa, Homo Sapien
QAEETYENIPGQSK

SEQ ID NO: 36 - protein, 17 aa, Homo Sapien
ATAAFILANEHNVALFK

SEQ ID NO: 37 - protein, 9 aa, Homo Sapien
HIVENAVQK

SEQ ID NO: 38 - protein, 11 aa, Homo Sapien
SLVEIADTVPK

SEQ ID NO: 39 - protein, 13 aa, Homo Sapien
VSDILHSIFSSYK

SEQ ID NO: 40 - protein, 11 aa, Homo Sapien
DQVDSYSLEAK

SEQ ID NO: 41 - protein, 13 aa, Homo Sapien
ITIATGQVAGTSK

SEQ ID NO: 42 - protein, 10 aa, Homo Sapien
FYSVNVDYSK

SEQ ID NO: 43 - protein, 14 aa, Homo Sapien
LNQNLNDVLVGLEK

SEQ ID NO: 44 - protein, 19 aa, Homo Sapien
VNHEPEPAGGATPGATLPK

SEQ ID NO: 45 - protein, 12 aa, Homo Sapien
ESDWNQHKELEK

SEQ ID NO: 46 - protein, 7 aa, Homo Sapien
AEEELIK

SEQ ID NO: 47 - protein, 25 aa, Homo Sapien
AGDVVLVIPFQNPEEQDEGWLMGVK

SEQ ID NO: 48 - protein, 10 aa, Homo Sapien
HHYESLQTAK

SEQ ID NO: 49 - protein, 15 aa, Homo Sapien
IAENNDLLWMDYHQK

SEQ ID NO: 50 - protein, 10 aa, Homo Sapien
LDLPPGFMFK

SEQ ID NO: 51 - protein, 20 aa, Homo Sapien
LVDQALLTMDTYLGQFPDIK

SEQ ID NO: 52 - protein, 20 aa, Homo Sapien
VGFYVNTFQSIAGLEENFHK

SEQ ID NO: 53 - protein, 18 aa, Homo Sapien
VQAQHDYTATDTDELQLK

SEQ ID NO: 54 - protein, 13 aa, Homo Sapien
DSQVVQVVLDGLK

SEQ ID NO: 55 - protein, 18 aa, Homo Sapien
NVPQEESLEDSDVDADFK

SEQ ID NO: 56 - protein, 14 aa, Homo Sapien
IEQLQNHENEDIYK

SEQ ID NO: 57 - protein, 16 aa, Homo Sapien
APVYFYEFQHQPSWLK

SEQ ID NO: 58 - protein, 12 aa, Homo Sapien
LGVLGFFSTGDK

SEQ ID NO: 59 - protein, 22 aa, Homo Sapien
KAGLAHLYGIAGSVNVTGDEVK

SEQ ID NO: 60 - protein, 21 aa, Homo Sapien
AGLAHLYGIAGSVNVTGDEVK

SEQ ID NO: 61 - protein, 10 aa, Homo Sapien
IYSLNEGYAK

SEQ ID NO: 62 - protein, 15 aa, Homo Sapien
TLVYGGIFLYPANQK

SEQ ID NO: 63 - protein, 12 aa, Homo Sapien
YFDAATTEYVQK

SEQ ID NO: 64 - protein, 13 aa, Homo Sapien
YFDAATTEYVQKK

SEQ ID NO: 65 - protein, 17 aa, Homo Sapien
GTGELTQLLNSMLTAIK

SEQ ID NO: 66 - protein, 25 aa, Homo Sapien
APSVALPVAQVPTDPGHFSVLLDVK

SEQ ID NO: 67 - protein, 10 aa, Homo Sapien
HFSPEEIAVK

SEQ ID NO: 68 - protein, 14 aa, Homo Sapien
VLYAYGYYTGEPSK

SEQ ID NO: 69 - protein, 32 aa, Homo Sapien
MNEVDFYEPFMDEPIAIPNKPYTEEELVEFVK

SEQ ID NO: 70 - protein, 14 aa, Homo Sapien
AFEEAAEHFQPYIK

SEQ ID NO: 71 - protein, 10 aa, Homo Sapien
AIGFVMVDAK

SEQ ID NO: 72 - protein, 12 aa, Homo Sapien
EEGLNFPTYDGK

SEQ ID NO: 73 - protein, 13 aa, Homo Sapien
SDPDGYEFLEILK

SEQ ID NO: 74 - protein, 8 aa, Homo Sapien
SEDSEYYK

SEQ ID NO: 75 - protein, 7 aa, Homo Sapien
VVSLSEK

SEQ ID NO: 76 - protein, 14 aa, Homo Sapien
EIVLELVAQVLEHK

SEQ ID NO: 77 - protein, 12 aa, Homo Sapien
SAFPHLQDAQVK

SEQ ID NO: 78 - protein, 12 aa, Homo Sapien
ALDLTQWLMVLK

SEQ ID NO: 79 - protein, 16 aa, Homo Sapien
ALGIVATTGVGTEIGK

SEQ ID NO: 80 - protein, 9 aa, Homo Sapien
PLTGPVKEK

SEQ ID NO: 81 - protein, 10 aa, Homo Sapien
VPLTGPVKEK

SEQ ID NO: 82 - protein, 28 aa, Homo Sapien
SKIVEYLQSYDEITAMTGDGVNDAPALK

SEQ ID NO: 83 - protein, 10 aa, Homo Sapien
AAVGNKMFVK

SEQ ID NO: 84 - protein, 9 aa, Homo Sapien
AVGNKMFVK

SEQ ID NO: 85 - protein, 8 aa, Homo Sapien
VGNKMFVK

SEQ ID NO: 86 - protein, 13 aa, Homo Sapien
AATEQDKTPLQQK

SEQ ID NO: 87 - protein, 16 aa, Homo Sapien
DQMAATEQDKTPLQQK

SEQ ID NO: 88 - protein, 20 aa, Homo Sapien
GVYEKVGEATETALTTLVEK

SEQ ID NO: 89 - protein, 15 aa, Homo Sapien
DIVPGDIVEVAVGDK

SEQ ID NO: 90 - protein, 10 aa, Homo Sapien
DQMAATEQDK

SEQ ID NO: 91 - protein, 12 aa, Homo Sapien
GSTYAPEGEVLK

SEQ ID NO: 92 - protein, 14 aa, Homo Sapien
GVSETTGLTPDQVK

SEQ ID NO: 93 - protein, 13 aa, Homo Sapien
ISLPVIGLDEILK

SEQ ID NO: 94 - protein, 26 aa, Homo Sapien
IVEYLQSYDEITAMTGDGVNDAPALK

SEQ ID NO: 95 - protein, 27 aa, Homo Sapien
IVEYLQSYDEITAMTGDGVNDAPALKK

SEQ ID NO: 96 - protein, 15 aa, Homo Sapien
SITGSTYAPEGEVLK

SEQ ID NO: 97 - protein, 10 aa, Homo Sapien
TYAPEGEVLK

SEQ ID NO: 98 - protein, 15 aa, Homo Sapien
VGEATETALTTLVEK

SEQ ID NO: 99 - protein, 8 aa, Homo Sapien
VPLTGPVK

SEQ ID NO: 100 - protein, 11 aa, Homo Sapien
EQGKEQAMFDK

SEQ ID NO: 101 - protein, 22 aa, Homo Sapien
VVKPLDVPAPSLEGDLGSTHWK

SEQ ID NO: 102 - protein, 9 aa, Homo Sapien
DYQDLLQVK

SEQ ID NO: 103 - protein, 14 aa, Homo Sapien
EGQGGPGSVSVDVK

SEQ ID NO: 104 - protein, 15 aa, Homo Sapien
EGQGGPGSVSVDVKK

SEQ ID NO: 105 - protein, 21 aa, Homo Sapien
GFLGSGYSSSATTQQENSYGK

SEQ ID NO: 106 - protein, 10 aa, Homo Sapien
IPHEFHTSMK

SEQ ID NO: 107 - protein, 10 aa, Homo Sapien
NDQAVGVSFK

SEQ ID NO: 108 - protein, 19 aa, Homo Sapien
QFTQSPETEASADSFPDTK

SEQ ID NO: 109 - protein, 13 aa, Homo Sapien
SGEFHAEPTVIEK

SEQ ID NO: 110 - protein, 11 aa, Homo Sapien
VLPLPIFTPAK

SEQ ID NO: 111 - protein, 31 aa, Homo Sapien
AQDQTQDTQLITVDEKLDITTLTGVPEEHIK

SEQ ID NO: 112 - protein, 16 aa, Homo Sapien
AQDQTQDTQLITVDEK

SEQ ID NO: 113 - protein, 10 aa, Homo Sapien
SYGANFSWNK

SEQ ID NO: 114 - protein, 15 aa, Homo Sapien
LDITTLTGVPEEHIK

SEQ ID NO: 115 - protein, 15 aa, Homo Sapien
ELDTVTLEDIKEHVK

SEQ ID NO: 116 - protein, 9 aa, Homo Sapien
EQQDLEFAK

SEQ ID NO: 117 - protein, 11 aa, Homo Sapien
FNQVLDQFGEK

SEQ ID NO: 118 - protein, 15 aa, Homo Sapien
LQLDSPEDAEFIVAK

SEQ ID NO: 119 - protein, 13 aa, Homo Sapien
NYLHYSLYDQAEK

SEQ ID NO: 120 - protein, 18 aa, Homo Sapien
LSGSNPYTTVTPQIINSK

SEQ ID NO: 121 - protein, 17 aa, Homo Sapien
MAPYQGPDAVPGALDYK

SEQ ID NO: 122 - protein, 16 aa, Homo Sapien
QFASQANVVGPWIQTK

SEQ ID NO: 123 - protein, 17 aa, Homo Sapien
VLAVNQENEHLMEDYEK

SEQ ID NO: 124 - protein, 16 aa, Homo Sapien
ETTDTDTADQVIASFK

SEQ ID NO: 125 - protein, 20 aa, Homo Sapien
MISDLIAGGIQPLQNLSVLK

SEQ ID NO: 126 - protein, 9 aa, Homo Sapien
YVALTSLLK

SEQ ID NO: 127 - protein, 11 aa, Homo Sapien
MNYSDAIVWLK

SEQ ID NO: 128 - protein, 12 aa, Homo Sapien
KLDLFANVVHVK

SEQ ID NO: 129 - protein, 16 aa, Homo Sapien
HLNLEYHSSMIADAVK

SEQ ID NO: 130 - protein, 12 aa, Homo Sapien
WLTIQSGEQPYK

SEQ ID NO: 131 - protein, 7 aa, Homo Sapien
PFLDIQK

SEQ ID NO: 132 - protein, 19 aa, Homo Sapien
FSVPDSESSETTTNTTTAK

SEQ ID NO: 133 - protein, 12 aa, Homo Sapien
LQEAQLELADIK

SEQ ID NO: 134 - protein, 11 aa, Homo Sapien
LYESALTENQK

SEQ ID NO: 135 - protein, 12 aa, Homo Sapien
SGATALHVAAAK

SEQ ID NO: 136 - protein, 18 aa, Homo Sapien
AKNEILDEVISLSQVTPK

SEQ ID NO: 137 - protein, 11 aa, Homo Sapien
ESVEQQADSFK

SEQ ID NO: 138 - protein, 12 aa, Homo Sapien
EVLEDFAEDGEK

SEQ ID NO: 139 - protein, 14 aa, Homo Sapien
IDQLQEELLHTQLK

SEQ ID NO: 140 - protein, 11 aa, Homo Sapien
VVVVGDQSAGK

SEQ ID NO: 141 - protein, 9 aa, Homo Sapien
EQILEEFSK

SEQ ID NO: 142 - protein, 13 aa, Homo Sapien
NLANTVTEEILEK

SEQ ID NO: 143 - protein, 17 aa, Homo Sapien
VTEGLTDVILYHQPDDK

SEQ ID NO: 144 - protein, 18 aa, Homo Sapien
LYQSTLLQDGLKDLLDEK

SEQ ID NO: 145 - protein, 12 aa, Homo Sapien
EFAPTEVNDIWK

SEQ ID NO: 146 - protein, 11 aa, Homo Sapien
EYFLSEIDEAK

SEQ ID NO: 147 - protein, 9 aa, Homo Sapien
SMFGVAVHK

SEQ ID NO: 148 - protein, 10 aa, Homo Sapien
DHVEKDDIIK

SEQ ID NO: 149 - protein, 12 aa, Homo Sapien
LYQSTLLQDGLK

SEQ ID NO: 150 - protein, 18 aa, Homo Sapien
GLDKLEENLPILQQPTEK

SEQ ID NO: 151 - protein, 11 aa, Homo Sapien
LHQMWLSWNQK

SEQ ID NO: 152 - protein, 16 aa, Homo Sapien
TLTAAAVSGAQPILSK

SEQ ID NO: 153 - protein, 12 aa, Homo Sapien
VSGAQEMVSSAK

SEQ ID NO: 154 - protein, 16 aa, Homo Sapien
KEQDDLLVLLADQDQK

SEQ ID NO: 155 - protein, 15 aa, Homo Sapien
EQDDLLVLLADQDQK

SEQ ID NO: 156 - protein, 20 aa, Homo Sapien
GVMGGQSAGPQHTEAETIQK

SEQ ID NO: 157 - protein, 9 aa, Homo Sapien
LSALLQETK

SEQ ID NO: 158 - protein, 15 aa, Homo Sapien
QSEDLGSQFTEIFIK

SEQ ID NO: 159 - protein, 12 aa, Homo Sapien
SQLNSQSVEITK

SEQ ID NO: 160 - protein, 13 aa, Homo Sapien
TLEQHDNIVTHYK

SEQ ID NO: 161 - protein, 16 aa, Homo Sapien
QLDSSNSTIAILQTEK

SEQ ID NO: 162 - protein, 11 aa, Homo Sapien
HFEATDILVSK

SEQ ID NO: 163 - protein, 10 aa, Homo Sapien
LQEEIVNSVK

SEQ ID NO: 164 - protein, 14 aa, Homo Sapien
LYSILGTTLKDEGK

SEQ ID NO: 165 - protein, 11 aa, Homo Sapien
NNPSKPLHVIK

SEQ ID NO: 166 - protein, 25 aa, Homo Sapien
AHDGGIYAISWSPDSTHLLSASGDK

SEQ ID NO: 167 - protein, 23 aa, Homo Sapien
VVTVFSVADGYSENNVFYGHHAK

SEQ ID NO: 168 - protein, 16 aa, Homo Sapien
YAPSGFYIASGDVSGK

SEQ ID NO: 169 - protein, 25 aa, Homo Sapien
LHHVSSLAWLDEHTLVTTSHDASVK

SEQ ID NO: 170 - protein, 22 aa, Homo Sapien
NIDNPALADIYTEHAHQVVVAK

SEQ ID NO: 171 - protein, 14 aa, Homo Sapien
PPVQTPLPVIPHQK

SEQ ID NO: 172 - protein, 31 aa, Homo Sapien
AAQSQLSQGDLVVAIDGVNTDTMTHLEAQNK

SEQ ID NO: 173 - protein, 16 aa, Homo Sapien
DLAVDSASPVYQAVIK

SEQ ID NO: 174 - protein, 22 aa, Homo Sapien
PIPISTTAPPVQTPLPVIPHQK

SEQ ID NO: 175 - protein, 12 aa, Homo Sapien
SASYNLSLTLQK

SEQ ID NO: 176 - protein, 13 aa, Homo Sapien
AVAALLTIPEVGK

SEQ ID NO: 177 - protein, 22 aa, Homo Sapien
LISLLTAPVYEQAVDGGPGLHK

SEQ ID NO: 178 - protein, 8 aa, Homo Sapien
STVITAVK

SEQ ID NO: 179 - protein, 9 aa, Homo Sapien
ATDLDQEVK

SEQ ID NO: 180 - protein, 9 aa, Homo Sapien
LVQLGQAEK

SEQ ID NO: 181 - protein, 18 aa, Homo Sapien
STGEALVQGLMGAAVTLK

SEQ ID NO: 182 - protein, 12 aa, Homo Sapien
VNDAMNMGHTAK

SEQ ID NO: 183 - protein, 14 aa, Homo Sapien
QSDVMIVAGTLTNK

SEQ ID NO: 184 - protein, 20 aa, Homo Sapien
AKIPGTGALASAAAAVSGSK

SEQ ID NO: 185 - protein, 18 aa, Homo Sapien
IPGTGALASAAAAVSGSK

SEQ ID NO: 186 - protein, 21 aa, Homo Sapien
QHQAQIDQYVGLVTNQLSHIK

SEQ ID NO: 187 - protein, 8 aa, Homo Sapien
VADLLYWK

SEQ ID NO: 188 - protein, 12 aa, Homo Sapien
APGFAHLAGLDK

SEQ ID NO: 189 - protein, 14 aa, Homo Sapien
YEGGYPALTEVMNK

SEQ ID NO: 190 - protein, 18 aa, Homo Sapien
ASASSTNLKDILADLIPK

SEQ ID NO: 191 - protein, 17 aa, Homo Sapien
SASSTNLKDILADLIPK

SEQ ID NO: 192 - protein, 9 aa, Homo Sapien
DILADLIPK

SEQ ID NO: 193 - protein, 9 aa, Homo Sapien
HLPNDPMFK

SEQ ID NO: 194 - protein, 11 aa, Homo Sapien
IVPNVLLEQGK

SEQ ID NO: 195 - protein, 9 aa, Homo Sapien
SMSTEGLMK

SEQ ID NO: 196 - protein, 13 aa, Homo Sapien
GHSLSDGLEEVQK

SEQ ID NO: 197 - protein, 17 aa, Homo Sapien
TYTDELTPIESAVSVFK

SEQ ID NO: 198 - protein, 15 aa, Homo Sapien
QLSAFGEYVAEILPK

SEQ ID NO: 199 - protein, 12 aa, Homo Sapien
GSGSVVGELMYK

SEQ ID NO: 200 - protein, 13 aa, Homo Sapien
GLIPQLIGVAPEK

SEQ ID NO: 201 - protein, 13 aa, Homo Sapien
GLLPQLLGVAPEK

SEQ ID NO: 202 - protein, 13 aa, Homo Sapien
IVQLLAGVADQTK

SEQ ID NO: 203 - protein, 12 aa, Homo Sapien
LATATFAGIENK

SEQ ID NO: 204 - protein, 13 aa, Homo Sapien
YLGLYNDPNSNPK

SEQ ID NO: 205 - protein, 11 aa, Homo Sapien
LQEESDLELAK

SEQ ID NO: 206 - protein, 13 aa, Homo Sapien
VEITYTPSDGTQK

SEQ ID NO: 207 - protein, 12 aa, Homo Sapien
QLPGVNIKPVVK

SEQ ID NO: 208 - protein, 16 aa, Homo Sapien
LALVGNWGTTGLTYPK

SEQ ID NO: 209 - protein, 24 aa, Homo Sapien
NLIPFDQMTIEDLNEAFPETKLDK

SEQ ID NO: 210 - protein, 9 aa, Homo Sapien
AGLVDDFEK

SEQ ID NO: 211 - protein, 17 aa, Homo Sapien
LAALPENPPAIDWAYYK

SEQ ID NO: 212 - protein, 16 aa, Homo Sapien
TIDWVAFAEIIPQNQK

SEQ ID NO: 213 - protein, 13 aa, Homo Sapien
KYPYWPHQPIENL

SEQ ID NO: 214 - protein, 11 aa, Homo Sapien
IVNSAQTGSFK

SEQ ID NO: 215 - protein, 12 aa, Homo Sapien
VAQVAEITYGQK

SEQ ID NO: 216 - protein, 18 aa, Homo Sapien
ALVSGKPAESSAVAATEK

SEQ ID NO: 217 - protein, 11 aa, Homo Sapien
NWASGHDLQGK

SEQ ID NO: 218 - protein, 20 aa, Homo Sapien
FMVQSMFAPTDTSDMEAVWK

SEQ ID NO: 219 - protein, 16 aa, Homo Sapien
TVQSNSPISALAPTGK

SEQ ID NO: 220 - protein, 11 aa, Homo Sapien
EAKPEDLMDSK

SEQ ID NO: 221 - protein, 14 aa, Homo Sapien
VEQVLSLEPQHELK

SEQ ID NO: 222 - protein, 15 aa, Homo Sapien
ITSAYLQDIENAYKK

SEQ ID NO: 223 - protein, 9 aa, Homo Sapien
VVEDIEYLK

SEQ ID NO: 224 - protein, 12 aa, Homo Sapien
YSPGYNTEVGDK

SEQ ID NO: 225 - protein, 15 aa, Homo Sapien
GLAPNQESHLQVPEK

SEQ ID NO: 226 - protein, 30 aa, Homo Sapien
LFAGSLAPLLQPGAAGGEIPAVQASSGSPK

SEQ ID NO: 227 - protein, 10 aa, Homo Sapien
QQPVPAPQQK

SEQ ID NO: 228 - protein, 21 aa, Homo Sapien
TEGPSPALLEETPLEPAVGPK

SEQ ID NO: 229 - protein, 11 aa, Homo Sapien
EYNEFAEVFLK

SEQ ID NO: 230 - protein, 12 aa, Homo Sapien
AFAVGVQQVLLK

SEQ ID NO: 231 - protein, 18 aa, Homo Sapien
AAEFGEPTSEQTGTAAGK

SEQ ID NO: 232 - protein, 14 aa, Homo Sapien
SNEEEETSDSSLEK

SEQ ID NO: 233 - protein, 18 aa, Homo Sapien
YQTQPVTLGEVEQVQSGK

SEQ ID NO: 234 - protein, 11 aa, Homo Sapien
DLVIVAANLQK

SEQ ID NO: 235 - protein, 15 aa, Homo Sapien
TAQALSSGSGSQETK

SEQ ID NO: 236 - protein, 15 aa, Homo Sapien
LASGVEGSDIPDDGK

SEQ ID NO: 237 - protein, 12 aa, Homo Sapien
LLSGGSVLDIIK

SEQ ID NO: 238 - protein, 17 aa, Homo Sapien
EVDSKPVSQKPPPPSEK

SEQ ID NO: 239 - protein, 15 aa, Homo Sapien
ETAPVSQPENKPESK

SEQ ID NO: 240 - protein, 23 aa, Homo Sapien
AAPSTAPAEATPPKPGEAEAPPK

SEQ ID NO: 241 - protein, 8 aa, Homo Sapien
KVQTILEK

SEQ ID NO: 242 - protein, 19 aa, Homo Sapien
THYPAQQGEYQTHQPVYHK

SEQ ID NO: 243 - protein, 12 aa, Homo Sapien
PAAQPSFHQAQK

SEQ ID NO: 244 - protein, 21 aa, Homo Sapien
KVETDHIVAAVGLEPNVELAK

SEQ ID NO: 245 - protein, 15 aa, Homo Sapien
AALSASEGEEVPQDK

SEQ ID NO: 246 - protein, 11 aa, Homo Sapien
ISGLGLTPEQK

SEQ ID NO: 247 - protein, 11 aa, Homo Sapien
LNDGSQITYEK

SEQ ID NO: 248 - protein, 20 aa, Homo Sapien
VETDHIVAAVGLEPNVELAK

SEQ ID NO: 249 - protein, 16 aa, Homo Sapien
VMPNAIVQSVGVSSGK

SEQ ID NO: 250 - protein, 13 aa, Homo Sapien
DGEQHEDLNEVAK

SEQ ID NO: 251 - protein, 12 aa, Homo Sapien
ELWFSDDPNVTK

SEQ ID NO: 252 - protein, 14 aa, Homo Sapien
IVSGKDYNVTANSK

SEQ ID NO: 253 - protein, 17 aa, Homo Sapien
DQLIYNLLKEEQTPQNK

SEQ ID NO: 254 - protein, 17 aa, Homo Sapien
DLADELALVDVIEDKLK

SEQ ID NO: 255 - protein, 15 aa, Homo Sapien
DLADELALVDVIEDK

SEQ ID NO: 256 - protein, 9 aa, Homo Sapien
DQLIYNLLK

SEQ ID NO: 257 - protein, 11 aa, Homo Sapien
QVVESAYEVIK

SEQ ID NO: 258 - protein, 22 aa, Homo Sapien
LKGYTSWAIGLSVADLAESIMK

SEQ ID NO: 259 - protein, 11 aa, Homo Sapien
KSADTLWGIQK

SEQ ID NO: 260 - protein, 15 aa, Homo Sapien
AIGLSVADLAESIMK

SEQ ID NO: 261 - protein, 20 aa, Homo Sapien
GYTSWAIGLSVADLAESIMK

SEQ ID NO: 262 - protein, 17 aa, Homo Sapien
LIIVSNPVDILTYVAWK

SEQ ID NO: 263 - protein, 17 aa, Homo Sapien
LLIVSNPVDILTYVAWK

SEQ ID NO: 264 - protein, 10 aa, Homo Sapien
SADTLWGIQK

SEQ ID NO: 265 - protein, 15 aa, Homo Sapien
IAKEEIFGPVQQIMK

SEQ ID NO: 266 - protein, 24 aa, Homo Sapien
YILGNPLTPGVTQGPQIDKEQYDK

SEQ ID NO: 267 - protein, 15 aa, Homo Sapien
ANNTFYGLSAGVFTK

SEQ ID NO: 268 - protein, 12 aa, Homo Sapien
EEIFGPVQQIMK

SEQ ID NO: 269 - protein, 14 aa, Homo Sapien
ELGEYGFHEYTEVK

SEQ ID NO: 270 - protein, 14 aa, Homo Sapien
IFINNEWHDSVSGK

SEQ ID NO: 271 - protein, 13 aa, Homo Sapien
LLLATMESMNGGK

SEQ ID NO: 272 - protein, 17 aa, Homo Sapien
PAEQTPLTALHVASLIK

SEQ ID NO: 273 - protein, 11 aa, Homo Sapien
VAFTGSTEVGK

SEQ ID NO: 274 - protein, 22 aa, Homo Sapien
LGIQTDDKGHIIVDEFQNTNVK

SEQ ID NO: 275 - protein, 14 aa, Homo Sapien
ADDLGKGGNEESTK

SEQ ID NO: 276 - protein, 12 aa, Homo Sapien
HVGDLGNVTADK

SEQ ID NO: 277 - protein, 21 aa, Homo Sapien
MFTTAPDQVDKEDEDFQESNK

SEQ ID NO: 278 - protein, 15 aa, Homo Sapien
ASAELALGENSEVLK

SEQ ID NO: 279 - protein, 23 aa, Homo Sapien
ISVAGVTSSNVGYLAHAIHQVTK

SEQ ID NO: 280 - protein, 23 aa, Homo Sapien
SSWWTHVEMGPPDPILGVTEAFK

SEQ ID NO: 281 - protein, 8 aa, Homo Sapien
KQWLQEVK

SEQ ID NO: 282 - protein, 9 aa, Homo Sapien
TQLVSNLKK

SEQ ID NO: 283 - protein, 18 aa, Homo Sapien
VLNNMEIGTSLFDEEGAK

SEQ ID NO: 284 - protein, 11 aa, Homo Sapien
YSLEPVAVELK

SEQ ID NO: 285 - protein, 11 aa, Homo Sapien
SLLGKDVLFLK

SEQ ID NO: 286 - protein, 8 aa, Homo Sapien
KELNYFAK

SEQ ID NO: 287 - protein, 18 aa, Homo Sapien
ITLPVDFVTADKFDENAK

SEQ ID NO: 288 - protein, 10 aa, Homo Sapien
FHVEEEGKGK

SEQ ID NO: 289 - protein, 14 aa, Homo Sapien
VADKIQLINNMLDK

SEQ ID NO: 290 - protein, 9 aa, Homo Sapien
LTLDKLDVK

SEQ ID NO: 291 - protein, 8 aa, Homo Sapien
TLDKLDVK

SEQ ID NO: 292 - protein, 24 aa, Homo Sapien
WNTEDKVSHVSTGGGASLELLEGK

SEQ ID NO: 293 - protein, 13 aa, Homo Sapien
AHSSMVGVNLPQK

SEQ ID NO: 294 - protein, 8 aa, Homo Sapien
FHVEEEGK

SEQ ID NO: 295 - protein, 10 aa, Homo Sapien
IQLINNMLDK

SEQ ID NO: 296 - protein, 8 aa, Homo Sapien
VDFNVPMK

SEQ ID NO: 297 - protein, 18 aa, Homo Sapien
VSHVSTGGGASLELLEGK

SEQ ID NO: 298 - protein, 14 aa, Homo Sapien
TKIIFVVGGPGSGK

SEQ ID NO: 299 - protein, 8 aa, Homo Sapien
KLSEIMEK

SEQ ID NO: 300 - protein, 11 aa, Homo Sapien
ATEPVIAFYEK

SEQ ID NO: 301 - protein, 9 aa, Homo Sapien
DDNEETIKK

SEQ ID NO: 302 - protein, 12 aa, Homo Sapien
IIFVVGGPGSGK

SEQ ID NO: 303 - protein, 9 aa, Homo Sapien
VDDNEETIK

SEQ ID NO: 304 - protein, 10 aa, Homo Sapien
VDDNEETIKK

SEQ ID NO: 305 - protein, 10 aa, Homo Sapien
VTSIQDWVQK

SEQ ID NO: 306 - protein, 18 aa, Homo Sapien
HDTSLKPISVSYNPATAK

SEQ ID NO: 307 - protein, 12 aa, Homo Sapien
ADGLAVIGVLMK

SEQ ID NO: 308 - protein, 7 aa, Homo Sapien
DALQAIK

SEQ ID NO: 309 - protein, 7 aa, Homo Sapien
DALQALK

SEQ ID NO: 310 - protein, 9 aa, Homo Sapien
VLDALQAIK

SEQ ID NO: 311 - protein, 16 aa, Homo Sapien
AVQQPDGLAVLGIFLK

SEQ ID NO: 312 - protein, 12 aa, Homo Sapien
EPISVSSEQVLK

SEQ ID NO: 313 - protein, 12 aa, Homo Sapien
QSPVDIDTHTAK

SEQ ID NO: 314 - protein, 7 aa, Homo Sapien
FDTISEK

SEQ ID NO: 315 - protein, 21 aa, Homo Sapien
VFSNGADLSGVTEEAPLKLSK

SEQ ID NO: 316 - protein, 9 aa, Homo Sapien
KQINDYVEK

SEQ ID NO: 317 - protein, 25 aa, Homo Sapien
EDPQGDAAQKTDTSHHDQDHPTFNK

SEQ ID NO: 318 - protein, 16 aa, Homo Sapien
DTEEEDFHVDQVTTVK

SEQ ID NO: 319 - protein, 15 aa, Homo Sapien
LQHLENELTHDIITK

SEQ ID NO: 320 - protein, 10 aa, Homo Sapien
LSITGTYDLK

SEQ ID NO: 321 - protein, 19 aa, Homo Sapien
LYHSEAFTVNFGDTEEAKK

SEQ ID NO: 322 - protein, 10 aa, Homo Sapien
SVLGQLGITK

SEQ ID NO: 323 - protein, 15 aa, Homo Sapien
TDTSHHDQDHPTFNK

SEQ ID NO: 324 - protein, 18 aa, Homo Sapien
VFSNGADLSGVTEEAPLK

SEQ ID NO: 325 - protein, 19 aa, Homo Sapien
AVLDVFEEGTEASAATAVK

SEQ ID NO: 326 - protein, 9 aa, Homo Sapien
EIGELYLPK

SEQ ID NO: 327 - protein, 18 aa, Homo Sapien
LYGSEAFATDFQDSAAAK

SEQ ID NO: 328 - protein, 12 aa, Homo Sapien
NEDSLVFVQTDK

SEQ ID NO: 329 - protein, 16 aa, Homo Sapien
QFSFPLSSEPFQGSYK

SEQ ID NO: 330 - protein, 23 aa, Homo Sapien
QQNAQGGFSSTQDTVVALHALSK

SEQ ID NO: 331 - protein, 9 aa, Homo Sapien
VPDTITEWK

SEQ ID NO: 332 - protein, 14 aa, Homo Sapien
GQGTLSVVTMYHAK

SEQ ID NO: 333 - protein, 11 aa, Homo Sapien
QPSSAFAAFVK

SEQ ID NO: 334 - protein, 13 aa, Homo Sapien
SSLSVPYVIVPLK

SEQ ID NO: 335 - protein, 16 aa, Homo Sapien
VHQYFNVELIQPGAVK

SEQ ID NO: 336 - protein, 18 aa, Homo Sapien
TVAAPSVFIFPPSDEQLK

SEQ ID NO: 337 - protein, 20 aa, Homo Sapien
VDNALQSGNSQESVTEQDSK

SEQ ID NO: 338 - protein, 14 aa, Homo Sapien
FNWYVDGVEVHNAK

SEQ ID NO: 339 - protein, 22 aa, Homo Sapien
GFYPSDIAVEWESNGQPENNYK

SEQ ID NO: 340 - protein, 12 aa, Homo Sapien
GPSVFPLAPSSK

SEQ ID NO: 341 - protein, 17 aa, Homo Sapien
TTPPVLDSDGSFFLYSK

SEQ ID NO: 342 - protein, 16 aa, Homo Sapien
VVSVLTVLHQDWLNGK

SEQ ID NO: 343 - protein, 19 aa, Homo Sapien
FFESFGDLSSPDAVMGNPK

SEQ ID NO: 344 - protein, 9 aa, Homo Sapien
TAVNALWGK

SEQ ID NO: 345 - protein, 13 aa, Homo Sapien
KGHHEAEIKPLAQ

SEQ ID NO: 346 - protein, 15 aa, Homo Sapien
KGHHEAEIKPLAQSH

SEQ ID NO: 347 - protein, 18 aa, Homo Sapien
KGHHEAEIKPLAQSHATK

SEQ ID NO: 348 - protein, 12 aa, Homo Sapien
SEDEMKASEDLK

SEQ ID NO: 349 - protein, 13 aa, Homo Sapien
DMASNYKELGFQG

SEQ ID NO: 350 - protein, 11 aa, Homo Sapien
GHPETLEKFDK

SEQ ID NO: 351 - protein, 11 aa, Homo Sapien
LFKGHPETLEK

SEQ ID NO: 352 - protein, 15 aa, Homo Sapien
KHGATVLTALGGILK

SEQ ID NO: 353 - protein, 12 aa, Homo Sapien
GHHEAEIKPLAQ

SEQ ID NO: 354 - protein, 14 aa, Homo Sapien
GHHEAEIKPLAQSH

SEQ ID NO: 355 - protein, 12 aa, Homo Sapien
EIKPLAQSHATK

SEQ ID NO: 356 - protein, 17 aa, Homo Sapien
GHHEAEIKPLAQSHATK

SEQ ID NO: 357 - protein, 15 aa, Homo Sapien
HEAEIKPLAQSHATK

SEQ ID NO: 358 - protein, 16 aa, Homo Sapien
HHEAEIKPLAQSHATK

SEQ ID NO: 359 - protein, 7 aa, Homo Sapien
AIGGIIK

SEQ ID NO: 360 - protein, 7 aa, Homo Sapien
ALGGILK

SEQ ID NO: 361 - protein, 7 aa, Homo Sapien
ALGGLLK

SEQ ID NO: 362 - protein, 12 aa, Homo Sapien
ATVLTALGGILK

SEQ ID NO: 363 - protein, 11 aa, Homo Sapien
FGADAQGAMNK

SEQ ID NO: 364 - protein, 13 aa, Homo Sapien
GATVLTALGGILK

SEQ ID NO: 365 - protein, 13 aa, Homo Sapien
GDFGADAQGAMNK

SEQ ID NO: 366 - protein, 16 aa, Homo Sapien
GLSDGEWQLVLNVWGK

SEQ ID NO: 367 - protein, 14 aa, Homo Sapien
HGATVLTALGGILK

SEQ ID NO: 368 - protein, 15 aa, Homo Sapien
HGATVLTALGGILKK

SEQ ID NO: 369 - protein, 15 aa, Homo Sapien
HPGDFGADAQGAMNK

SEQ ID NO: 370 - protein, 15 aa, Homo Sapien
LSDGEWQLVLNVWGK

SEQ ID NO: 371 - protein, 11 aa, Homo Sapien
TVLTALGGILK

SEQ ID NO: 372 - protein, 10 aa, Homo Sapien
VLTALGGILK

SEQ ID NO: 373 - protein, 16 aa, Homo Sapien
YLEFISECIIQVLQSK

SEQ ID NO: 374 - protein, 11 aa, Homo Sapien
EEKPAVTAAPK

SEQ ID NO: 375 - protein, 8 aa, Homo Sapien
FSVNLDVK

SEQ ID NO: 376 - protein, 10 aa, Homo Sapien
HFSPEELKVK

SEQ ID NO: 377 - protein, 8 aa, Homo Sapien
HFSPEELK

SEQ ID NO: 378 - protein, 10 aa, Homo Sapien
KDAEEWFFTK

SEQ ID NO: 379 - protein, 9 aa, Homo Sapien
DAEEWFFTK

SEQ ID NO: 380 - protein, 12 aa, Homo Sapien
NKLEGLEDALQK

SEQ ID NO: 381 - protein, 10 aa, Homo Sapien
AEAESWYQTK

SEQ ID NO: 382 - protein, 17 aa, Homo Sapien
AIGGGLSSVGGGSSTIK

SEQ ID NO: 383 - protein, 10 aa, Homo Sapien
GMQDLVEDFK

SEQ ID NO: 384 - protein, 11 aa, Homo Sapien
TAAENEFVTLK

SEQ ID NO: 385 - protein, 12 aa, Homo Sapien
TAAENEFVTLKK

SEQ ID NO: 386 - protein, 12 aa, Homo Sapien
LQTMKEELDFQK

SEQ ID NO: 387 - protein, 11 aa, Homo Sapien
EAALSTALSEK

SEQ ID NO: 388 - protein, 13 aa, Homo Sapien
SNEDQSMGNWQIK

SEQ ID NO: 389 - protein, 11 aa, Homo Sapien
LKDLEALLNSK

SEQ ID NO: 390 - protein, 12 aa, Homo Sapien
AQHEDQVEQYKK

SEQ ID NO: 391 - protein, 13 aa, Homo Sapien
IDSLSAQLSQLQK

SEQ ID NO: 392 - protein, 15 aa, Homo Sapien
MQQQLDEYQELLDIK

SEQ ID NO: 393 - protein, 11 aa, Homo Sapien
VAVEEVDEEGK

SEQ ID NO: 394 - protein, 16 aa, Homo Sapien
ASGEHVTDEEIESLMK

SEQ ID NO: 395 - protein, 17 aa, Homo Sapien
AAFDMFDADGGGDISVK

SEQ ID NO: 396 - protein, 8 aa, Homo Sapien
MLGQTPTK

SEQ ID NO: 397 - protein, 12 aa, Homo Sapien
SYLSEEMIAEFK

SEQ ID NO: 398 - protein, 14 aa, Homo Sapien
LLDNWDSVTSTFSK

SEQ ID NO: 399 - protein, 11 aa, Homo Sapien
QGLLPVLESFK

SEQ ID NO: 400 - protein, 11 aa, Homo Sapien
VQPYLDDFQKK

SEQ ID NO: 401 - protein, 12 aa, Homo Sapien
VSFLSALEEYTK

SEQ ID NO: 402 - protein, 12 aa, Homo Sapien
EVDLKDYEDQQK

SEQ ID NO: 403 - protein, 11 aa, Homo Sapien
GSESGIFTNTK

SEQ ID NO: 404 - protein, 8 aa, Homo Sapien
QLEQVIAK

SEQ ID NO: 405 - protein, 17 aa, Homo Sapien
MGPTELLIEMEDWKGDK

SEQ ID NO: 406 - protein, 15 aa, Homo Sapien
DNENVVNEYSSELEK

SEQ ID NO: 407 - protein, 28 aa, Homo Sapien
NSVDELNNNVEAVSQTSSSSFQYMYLLK

SEQ ID NO: 408 - protein, 23 aa, Homo Sapien
AIQLTYNPDESSKPNMIDAATLK

SEQ ID NO: 409 - protein, 20 aa, Homo Sapien
EGFGHLSPTGTTEFWLGNEK

SEQ ID NO: 410 - protein, 15 aa, Homo Sapien
LTIGEGQQHHLGGAK

SEQ ID NO: 411 - protein, 10 aa, Homo Sapien
TSTADYAMFK

SEQ ID NO: 412 - protein, 10 aa, Homo Sapien
FKDLGEENFK

SEQ ID NO: 413 - protein, 15 aa, Homo Sapien
AEFAEVSKLVTDLTK

SEQ ID NO: 414 - protein, 17 aa, Homo Sapien
VFDEFKPLVEEPQNLIK

SEQ ID NO: 415 - protein, 10 aa, Homo Sapien
KQTALVELVK

SEQ ID NO: 416 - protein, 8 aa, Homo Sapien
AEFAEVSK

SEQ ID NO: 417 - protein, 12 aa, Homo Sapien
AVMDDFAAFVEK

SEQ ID NO: 418 - protein, 14 aa, Homo Sapien
HPYFYAPELLFFAK

SEQ ID NO: 419 - protein, 10 aa, Homo Sapien
LVNEVTEFAK

SEQ ID NO: 420 - protein, 9 aa, Homo Sapien
QTALVELVK

SEQ ID NO: 421 - protein, 8 aa, Homo Sapien
TYETTLEK

SEQ ID NO: 422 - protein, 9 aa, Homo Sapien
SLHTLFGDK

SEQ ID NO: 423 - protein, 12 aa, Homo Sapien
KSASDLTWDNLK

SEQ ID NO: 424 - protein, 10 aa, Homo Sapien
DGAGDVAFVK

SEQ ID NO: 425 - protein, 14 aa, Homo Sapien
EDPQTFYYAVAVVK

SEQ ID NO: 426 - protein, 11 aa, Homo Sapien
EFQLFSSPHGK

SEQ ID NO: 427 - protein, 11 aa, Homo Sapien
HSTIFENLANK

SEQ ID NO: 428 - protein, 11 aa, Homo Sapien
SASDLTWDNLK

SEQ ID NO: 429 - protein, 11 aa, Homo Sapien
NVNQSLLELHK

SEQ ID NO: 430 - protein, 17 aa, Homo Sapien
TISQHQISTSIITSTQK

SEQ ID NO: 431 - protein, 14 aa, Homo Sapien
VWPHKDYPLIPVGK

SEQ ID NO: 432 - protein, 15 aa, Homo Sapien
ADVLTTGAGNPVGDK

SEQ ID NO: 433 - protein, 10 aa, Homo Sapien
DLFNAIATGK

SEQ ID NO: 434 - protein, 16 aa, Homo Sapien
GAGAFGYFEVTHDITK

SEQ ID NO: 435 - protein, 17 aa, Homo Sapien
ALSDHHIYLEGTLLKPN

SEQ ID NO: 436 - protein, 15 aa, Homo Sapien
ALSDHHIYLEGTLLK

SEQ ID NO: 437 - protein, 12 aa, Homo Sapien
PYQYPALTPEQK

SEQ ID NO: 438 - protein, 13 aa, Homo Sapien
PYQYPALTPEQKK

SEQ ID NO: 439 - protein, 18 aa, Homo Sapien
SGGQSEEEASINLNAINK

SEQ ID NO: 440 - protein, 30 aa, Homo Sapien
TVPPAVTGITFLSGGQSEEEASINLNAINK

SEQ ID NO: 441 - protein, 9 aa, Homo Sapien
SKGGVVGIK

SEQ ID NO: 442 - protein, 20 aa, Homo Sapien
IVAPGKGILAADESTGSIAK

SEQ ID NO: 443 - protein, 10 aa, Homo Sapien
GGVVGIKVDK

SEQ ID NO: 444 - protein, 9 aa, Homo Sapien
GVVGIKVDK

SEQ ID NO: 445 - protein, 8 aa, Homo Sapien
ALQASALK

SEQ ID NO: 446 - protein, 14 aa, Homo Sapien
GILAADESTGSIAK

SEQ ID NO: 447 - protein, 7 aa, Homo Sapien
LQASALK

SEQ ID NO: 448 - protein, 9 aa, Homo Sapien
PALTPEQKK

SEQ ID NO: 449 - protein, 12 aa, Homo Sapien
SQVVAGTNYFIK

SEQ ID NO: 450 - protein, 13 aa, Homo Sapien
ALVEQGFTVPEIK

SEQ ID NO: 451 - protein, 14 aa, Homo Sapien
IVQILPWEQNEQVK

SEQ ID NO: 452 - protein, 15 aa, Homo Sapien
VSALLTPAEQTGTWK

SEQ ID NO: 453 - protein, 9 aa, Homo Sapien
DFGSFDKFK

SEQ ID NO: 454 - protein, 22 aa, Homo Sapien
HHAAYVNNLNVTEEKYQEALAK

SEQ ID NO: 455 - protein, 14 aa, Homo Sapien
GDVTAQIALQPALK

SEQ ID NO: 456 - protein, 15 aa, Homo Sapien
HHAAYVNNLNVTEEK

SEQ ID NO: 457 - protein, 28 aa, Homo Sapien
HSLPDLPYDYGALEPHINAQIMQLHHSK

SEQ ID NO: 458 - protein, 7 aa, Homo Sapien
YQEALAK

SEQ ID NO: 459 - protein, 29 aa, Homo Sapien
KHSLPDLPYDYGALEPHINAQIMQLHHSK

SEQ ID NO: 460 - protein, 17 aa, Homo Sapien
ATGGGLSSVGGGSSTIK

SEQ ID NO: 461 - protein, 12 aa, Homo Sapien
SKAEAESLYQSK

SEQ ID NO: 462 - protein, 10 aa, Homo Sapien
KDVDGAYMTK

SEQ ID NO: 463 - protein, 14 aa, Homo Sapien
NKLNDLEDALQQAK

SEQ ID NO: 464 - protein, 10 aa, Homo Sapien
AEAESLYQSK

SEQ ID NO: 465 - protein, 9 aa, Homo Sapien
AQYEDIAQK

SEQ ID NO: 466 - protein, 9 aa, Homo Sapien
DVDGAYMTK

SEQ ID NO: 467 - protein, 9 aa, Homo Sapien
DYQELMNTK

SEQ ID NO: 468 - protein, 19 aa, Homo Sapien
INQSLLQPLNVEIDPEIQK

SEQ ID NO: 469 - protein, 15 aa, Homo Sapien
LLQPLNVEIDPEIQK

SEQ ID NO: 470 - protein, 12 aa, Homo Sapien
LNDLEDALQQAK

SEQ ID NO: 471 - protein, 14 aa, Homo Sapien
LQPLNVEIDPEIQK

SEQ ID NO: 472 - protein, 10 aa, Homo Sapien
NVEIDPEIQK

SEQ ID NO: 473 - protein, 10 aa, Homo Sapien
NVELDPEIQK

SEQ ID NO: 474 - protein, 17 aa, Homo Sapien
QSLLQPLNVEIDPEIQK

SEQ ID NO: 475 - protein, 12 aa, Homo Sapien
SLDLDSIIAEVK

SEQ ID NO: 476 - protein, 12 aa, Homo Sapien
SLNNQFASFIDK

SEQ ID NO: 477 - protein, 9 aa, Homo Sapien
SLVNLGGSK

SEQ ID NO: 478 - protein, 11 aa, Homo Sapien
TNAENEFVTIK

SEQ ID NO: 479 - protein, 12 aa, Homo Sapien
TNAENEFVTIKK

SEQ ID NO: 480 - protein, 10 aa, Homo Sapien
DLMAHMASKE

SEQ ID NO: 481 - protein, 12 aa, Homo Sapien
VVDLMAHMASKE

SEQ ID NO: 482 - protein, 23 aa, Homo Sapien
IKWGDAGAEYVVESTGVFTTMEK

SEQ ID NO: 483 - protein, 17 aa, Homo Sapien
APSADAPMFVMGVNHEK

SEQ ID NO: 484 - protein, 15 aa, Homo Sapien
GALQNIIPASTGAAK

SEQ ID NO: 485 - protein, 38 aa, Homo Sapien
GILGYTEHQVVSSDFNSDTHSSTFDAGAGIALNDHFVK

SEQ ID NO: 486 - protein, 11 aa, Homo Sapien
VVDLMAHMASK

SEQ ID NO: 487 - protein, 21 aa, Homo Sapien
WGDAGAEYVVESTGVFTTMEK

SEQ ID NO: 488 - protein, 11 aa, Homo Sapien
LEKPAKYDDIK

SEQ ID NO: 489 - protein, 32 aa, Homo Sapien
VIHDNFGIVEGLMTTVHAITATQKTVDGPSGK

SEQ ID NO: 490 - protein, 27 aa, Homo Sapien
VIISAPSADAPMFVMGVNHEKYDNSLK

SEQ ID NO: 491 - protein, 19 aa, Homo Sapien
FGIVEGLMTTVHAITATQK

SEQ ID NO: 492 - protein, 10 aa, Homo Sapien
IIPASTGAAK

SEQ ID NO: 493 - protein, 19 aa, Homo Sapien
ISAPSADAPMFVMGVNHEK

SEQ ID NO: 494 - protein, 10 aa, Homo Sapien
MFQYDSTHGK

SEQ ID NO: 495 - protein, 12 aa, Homo Sapien
MTTVHAITATQK

SEQ ID NO: 496 - protein, 16 aa, Homo Sapien
PSADAPMFVMGVNHEK

SEQ ID NO: 497 - protein, 8 aa, Homo Sapien
QASEGPLK

SEQ ID NO: 498 - protein, 24 aa, Homo Sapien
VIHDNFGIVEGLMTTVHAITATQK

SEQ ID NO: 499 - protein, 21 aa, Homo Sapien
VIISAPSADAPMFVMGVNHEK

SEQ ID NO: 500 - protein, 23 aa, Homo Sapien
LFAQLAGDDMEVSATELMNILNK

SEQ ID NO: 501 - protein, 13 aa, Homo Sapien
SMVAVMDSDTTGK

SEQ ID NO: 502 - protein, 11 aa, Homo Sapien
TKDGVVEITGK

SEQ ID NO: 503 - protein, 31 aa, Homo Sapien
KYTLPPGVDPTQVSSSLSPEGTLTVEAPMPK

SEQ ID NO: 504 - protein, 16 aa, Homo Sapien
VSLDVNHFAPDELTVK

SEQ ID NO: 505 - protein, 30 aa, Homo Sapien
YTLPPGVDPTQVSSSLSPEGTLTVEAPMPK

SEQ ID NO: 506 - protein, 24 aa, Homo Sapien
ISTEVGITNVDLSTVDKDQSIAPK

SEQ ID NO: 507 - protein, 17 aa, Homo Sapien
LQVTNVLSQPLTQATVK

SEQ ID NO: 508 - protein, 14 aa, Homo Sapien
TGQEVVFVAEPDNK

SEQ ID NO: 509 - protein, 13 aa, Homo Sapien
AVAGDASESALLK

SEQ ID NO: 510 - protein, 25 aa, Homo Sapien
VGNVEYFGLGNSPGFPLQYYPYYGK

SEQ ID NO: 511 - protein, 11 aa, Homo Sapien
AYGENIGYSEK

SEQ ID NO: 512 - protein, 14 aa, Homo Sapien
VAPPGLTQIPQIQK

SEQ ID NO: 513 - protein, 12 aa, Homo Sapien
YYAGWADKYHGK

SEQ ID NO: 514 - protein, 15 aa, Homo Sapien
ANNSTYGLAAAVFTK

SEQ ID NO: 515 - protein, 14 aa, Homo Sapien
ELGEYGLQAYTEVK

SEQ ID NO: 516 - protein, 14 aa, Homo Sapien
LGPALATGNVVVMK

SEQ ID NO: 517 - protein, 13 aa, Homo Sapien
TEQGPQVDETQFK

SEQ ID NO: 518 - protein, 14 aa, Homo Sapien
TEQGPQVDETQFKK

SEQ ID NO: 519 - protein, 17 aa, Homo Sapien
VAEQTPLTALYVANLIK

SEQ ID NO: 520 - protein, 10 aa, Homo Sapien
YGLAAAVFTK

SEQ ID NO: 521 - protein, 14 aa, Homo Sapien
LEDMEQALSPSVFK

SEQ ID NO: 522 - protein, 11 aa, Homo Sapien
TNLESILSYPK

SEQ ID NO: 523 - protein, 11 aa, Homo Sapien
GHLENNPALEK

SEQ ID NO: 524 - protein, 9 aa, Homo Sapien
GNVGFVFTK

SEQ ID NO: 525 - protein, 10 aa, Homo Sapien
IIQLLDDYPK

SEQ ID NO: 526 - protein, 12 aa, Homo Sapien
TSFFQALGITTK

SEQ ID NO: 527 - protein, 8 aa, Homo Sapien
NGDILTLK

SEQ ID NO: 528 - protein, 14 aa, Homo Sapien
QVASMTKPTTIIEK

SEQ ID NO: 529 - protein, 26 aa, Homo Sapien
KPVAAAAAAPAPAPAPAPAPAPAKPK

SEQ ID NO: 530 - protein, 18 aa, Homo Sapien
MKEEEVEALMAGQEDSNG

SEQ ID NO: 531 - protein, 21 aa, Homo Sapien
AAAAPAPAPAPAPAPAPAKPK

SEQ ID NO: 532 - protein, 19 aa, Homo Sapien
AAPAPAPAPAPAPAPAKPK

SEQ ID NO: 533 - protein, 16 aa, Homo Sapien
APAPAPAPAPAPAKPK

SEQ ID NO: 534 - protein, 18 aa, Homo Sapien
APAPAPAPAPAPAPAKPK

SEQ ID NO: 535 - protein, 17 aa, Homo Sapien
PAPAPAPAPAPAPAKPK

SEQ ID NO: 536 - protein, 24 aa, Homo Sapien
KPVAAAAAAPAPAPAPAPAPAPAK

SEQ ID NO: 537 - protein, 14 aa, Homo Sapien
KVLGNPSNEELNAK

SEQ ID NO: 538 - protein, 13 aa, Homo Sapien
VLGNPSNEELNAK

SEQ ID NO: 539 - protein, 14 aa, Homo Sapien
VLGNPSNEELNAKK

SEQ ID NO: 540 - protein, 10 aa, Homo Sapien
EQQDEFKEAF

SEQ ID NO: 541 - protein, 12 aa, Homo Sapien
IEFSKEQQDEFK

SEQ ID NO: 542 - protein, 10 aa, Homo Sapien
EEKIDLSAIK

SEQ ID NO: 543 - protein, 13 aa, Homo Sapien
KIEFEQFLPMMQA

SEQ ID NO: 544 - protein, 18 aa, Homo Sapien
KIEFEQFLPMMQAISNNK

SEQ ID NO: 545 - protein, 12 aa, Homo Sapien
IDLSAIKIEFSK

SEQ ID NO: 546 - protein, 12 aa, Homo Sapien
APAPAPAPAKPK

SEQ ID NO: 547 - protein, 14 aa, Homo Sapien
APAPAPAPAPAKPK

SEQ ID NO: 548 - protein, 11 aa, Homo Sapien
PAPAPAPAKPK

SEQ ID NO: 549 - protein, 13 aa, Homo Sapien
PAPAPAPAPAKPK

SEQ ID NO: 550 - protein, 15 aa, Homo Sapien
PAPAPAPAPAPAKPK

SEQ ID NO: 551 - protein, 9 aa, Homo Sapien
HVLATLGEK

SEQ ID NO: 552 - protein, 7 aa, Homo Sapien
IDLSAIK

SEQ ID NO: 553 - protein, 7 aa, Homo Sapien
IDLSALK

SEQ ID NO: 554 - protein, 17 aa, Homo Sapien
IEFEQFLPMMQAISNNK

SEQ ID NO: 555 - protein, 7 aa, Homo Sapien
LDISAIK

SEQ ID NO: 556 - protein, 7 aa, Homo Sapien
LDLSALK

SEQ ID NO: 557 - protein, 13 aa, Homo Sapien
AGALNSNDAFVLK

SEQ ID NO: 558 - protein, 22 aa, Homo Sapien
AQPVQVAEGSEPDGFWEALGGK

SEQ ID NO: 559 - protein, 12 aa, Homo Sapien
EPAHLMSLFGGK

SEQ ID NO: 560 - protein, 12 aa, Homo Sapien
PALPAGTEDTAK

SEQ ID NO: 561 - protein, 18 aa, Homo Sapien
TPSAAYLWVGTGASEAEK

SEQ ID NO: 562 - protein, 20 aa, Homo Sapien
VHVSEEGTEPEAMLQVLGPK

SEQ ID NO: 563 - protein, 28 aa, Homo Sapien
VPFDAATLHTSTAMAAQHGMDDDGTGQK

SEQ ID NO: 564 - protein, 15 aa, Homo Sapien
DSQEEEKTEALTSAK

SEQ ID NO: 565 - protein, 17 aa, Homo Sapien
QTQVSVLPEGGETPLFK

SEQ ID NO: 566 - protein, 27 aa, Homo Sapien
QFAPIHAEAPEFMEMSVEQEILVTGIK

SEQ ID NO: 567 - protein, 7 aa, Homo Sapien
PLKETIK

SEQ ID NO: 568 - protein, 8 aa, Homo Sapien
VPLKETIK

SEQ ID NO: 569 - protein, 24 aa, Homo Sapien
IGLFGGAGVGKTVLIMELINNVAK

SEQ ID NO: 570 - protein, 18 aa, Homo Sapien
EGNDLYHEMIESGVINLK

SEQ ID NO: 571 - protein, 18 aa, Homo Sapien
FLSQPFQVAEVFTGHMGK

SEQ ID NO: 572 - protein, 30 aa, Homo Sapien
GFQQILAGEYDHLPEQAFYMVGPIEEAVAK

SEQ ID NO: 573 - protein, 11 aa, Homo Sapien
IGLFGGAGVGK

SEQ ID NO: 574 - protein, 19 aa, Homo Sapien
SLQDIIAILGMDELSEEDK

SEQ ID NO: 575 - protein, 13 aa, Homo Sapien
TVLIMELINNVAK

SEQ ID NO: 576 - protein, 10 aa, Homo Sapien
VVDLLAPYAK

SEQ ID NO: 577 - protein, 13 aa, Homo Sapien
LGHPDTLNQGEFK

SEQ ID NO: 578 - protein, 15 aa, Homo Sapien
NIETIINTFHQYSVK

SEQ ID NO: 579 - protein, 15 aa, Homo Sapien
VIEHIMEDLDTNADK

SEQ ID NO: 580 - protein, 21 aa, Homo Sapien
LNYKPEEEYPDLSKHNNHMAK

SEQ ID NO: 581 - protein, 30 aa, Homo Sapien
SMTEKEQQQLIDDHFLFDKPVSPLLLASGM

SEQ ID NO: 582 - protein, 27 aa, Homo Sapien
DKETPSGFTVDDVIQTGVDNPGHPFIM

SEQ ID NO: 583 - protein, 12 aa, Homo Sapien
YKPEEEYPDLSK

SEQ ID NO: 584 - protein, 25 aa, Homo Sapien
EQQQLIDDHFLFDKPVSPLLLASGM

SEQ ID NO: 585 - protein, 8 aa, Homo Sapien
LMVEMEKK

SEQ ID NO: 586 - protein, 8 aa, Homo Sapien
LTLELYKK

SEQ ID NO: 587 - protein, 8 aa, Homo Sapien
VLTLELYK

SEQ ID NO: 588 - protein, 9 aa, Homo Sapien
VLTLELYKK

SEQ ID NO: 589 - protein, 16 aa, Homo Sapien
FKLNYKPEEEYPDLSK

SEQ ID NO: 590 - protein, 8 aa, Homo Sapien
GNTHNKFK

SEQ ID NO: 591 - protein, 10 aa, Homo Sapien
PFGNTHNKFK

SEQ ID NO: 592 - protein, 16 aa, Homo Sapien
LSVEALNSLTGEFKGK

SEQ ID NO: 593 - protein, 15 aa, Homo Sapien
TDLNHENLKGGDDLD

SEQ ID NO: 594 - protein, 15 aa, Homo Sapien
LEKGQSIDDMIPAQK

SEQ ID NO: 595 - protein, 24 aa, Homo Sapien
LGSSEVEQVQLVVDGVKLMVEMEK

SEQ ID NO: 596 - protein, 18 aa, Homo Sapien
AVEKLSVEALNSLTGEFK

SEQ ID NO: 597 - protein, 14 aa, Homo Sapien
LNYKPEEEYPDLSK

SEQ ID NO: 598 - protein, 7 aa, Homo Sapien
GKYYPLK

SEQ ID NO: 599 - protein, 8 aa, Homo Sapien
DLNHENLK

SEQ ID NO: 600 - protein, 12 aa, Homo Sapien
GQSIDDMIPAQK

SEQ ID NO: 601 - protein, 7 aa, Homo Sapien
IEEIFKK

SEQ ID NO: 602 - protein, 17 aa, Homo Sapien
LGSSEVEQVQLVVDGVK

SEQ ID NO: 603 - protein, 7 aa, Homo Sapien
LMVEMEK

SEQ ID NO: 604 - protein, 14 aa, Homo Sapien
LSVEALNSLTGEFK

SEQ ID NO: 605 - protein, 10 aa, Homo Sapien
SIDDMIPAQK

SEQ ID NO: 606 - protein, 7 aa, Homo Sapien
SLTGEFK

SEQ ID NO: 607 - protein, 9 aa, Homo Sapien
TDLNHENLK

SEQ ID NO: 608 - protein, 25 aa, Homo Sapien
SFIKDYPVVSIEDPFDQDDWGAWQK

SEQ ID NO: 609 - protein, 26 aa, Homo Sapien
DATNVGDEGGFAPNILENKEGLELLK

SEQ ID NO: 610 - protein, 11 aa, Homo Sapien
LNVTEQEKIDK

SEQ ID NO: 611 - protein, 14 aa, Homo Sapien
IDKLMIEMDGTENK

SEQ ID NO: 612 - protein, 21 aa, Homo Sapien
DYPVVSIEDPFDQDDWGAWQK

SEQ ID NO: 613 - protein, 13 aa, Homo Sapien
GNPTVEVDLFTSK

SEQ ID NO: 614 - protein, 8 aa, Homo Sapien
LNVTEQEK

SEQ ID NO: 615 - protein, 9 aa, Homo Sapien
TIAPALVSK

SEQ ID NO: 616 - protein, 12 aa, Homo Sapien
YISPDQLADLYK

SEQ ID NO: 617 - protein, 9 aa, Homo Sapien
SGKYDLDFK

SEQ ID NO: 618 - protein, 19 aa, Homo Sapien
DATNVGDEGGFAPNILENK

SEQ ID NO: 619 - protein, 20 aa, Homo Sapien
FTASAGIQVVGDDLTVTNPK

SEQ ID NO: 620 - protein, 10 aa, Homo Sapien
IGAEVYHNLK

SEQ ID NO: 621 - protein, 11 aa, Homo Sapien
LMIEMDGTENK

SEQ ID NO: 622 - protein, 18 aa, Homo Sapien
SNTPILVDGKDVMPEVNK

SEQ ID NO: 623 - protein, 23 aa, Homo Sapien
TFTTQETITNAETAKEWFLQAAK

SEQ ID NO: 624 - protein, 27 aa, Homo Sapien
KIEPELDGSAQVTSHDASTNGLINFIK

SEQ ID NO: 625 - protein, 11 aa, Homo Sapien
HFVALSTNTTK

SEQ ID NO: 626 - protein, 16 aa, Homo Sapien
LTPFMLGALVAMYEHK

SEQ ID NO: 627 - protein, 12 aa, Homo Sapien
MLGALVAMYEHK

SEQ ID NO: 628 - protein, 10 aa, Homo Sapien
SNTPILVDGK

SEQ ID NO: 629 - protein, 17 aa, Homo Sapien
TLAQLNPESSLFIIASK

SEQ ID NO: 630 - protein, 14 aa, Homo Sapien
VWYVSNIDGTHIAK

SEQ ID NO: 631 - protein, 15 aa, Homo Sapien
FAAYFQQGDMESNGK

SEQ ID NO: 632 - protein, 15 aa, Homo Sapien
TFTTQETITNAETAK

SEQ ID NO: 633 - protein, 30 aa, Homo Sapien
VDHQTGPIVWGEPGTNGQHAFYQLIHQGTK

SEQ ID NO: 634 - protein, 13 aa, Homo Sapien
SKQLEDELAAMQK

SEQ ID NO: 635 - protein, 11 aa, Homo Sapien
QLEDELAAMQK

SEQ ID NO: 636 - protein, 13 aa, Homo Sapien
TIDDLEDELYAQK

SEQ ID NO: 637 - protein, 10 aa, Homo Sapien
KESYSIYVYK

SEQ ID NO: 638 - protein, 11 aa, Homo Sapien
QVHPDTGISSK

SEQ ID NO: 639 - protein, 23 aa, Homo Sapien
IEGLDIHFIHVKPPQLPAGHTPK

SEQ ID NO: 640 - protein, 9 aa, Homo Sapien
IIPLLTDPK

SEQ ID NO: 641 - protein, 20 aa, Homo Sapien
VYVPTGFSAFPFELLHTPEK

SEQ ID NO: 642 - protein, 16 aa, Homo Sapien
TKPSDEEMLFIYGHYK

SEQ ID NO: 643 - protein, 10 aa, Homo Sapien
AKWDAWNELK

SEQ ID NO: 644 - protein, 16 aa, Homo Sapien
LIAPVAEEEATVPNNK

SEQ ID NO: 645 - protein, 14 aa, Homo Sapien
IVADKDYSVTANSK

SEQ ID NO: 646 - protein, 17 aa, Homo Sapien
SLADELALVDVLEDKLK

SEQ ID NO: 647 - protein, 17 aa, Homo Sapien
GEMMDLQHGSLFLQTPK

SEQ ID NO: 648 - protein, 15 aa, Homo Sapien
SLADELALVDVLEDK

SEQ ID NO: 649 - protein, 18 aa, Homo Sapien
EALPAPSDDATALMTDPK

SEQ ID NO: 650 - protein, 9 aa, Homo Sapien
NDVAWNFEK

SEQ ID NO: 651 - protein, 15 aa, Homo Sapien
LGETYKDHENIVIAK

SEQ ID NO: 652 - protein, 17 aa, Homo Sapien
NNFEGEVTKENLLDFIK

SEQ ID NO: 653 - protein, 12 aa, Homo Sapien
KSNFAEALAAHK

SEQ ID NO: 654 - protein, 8 aa, Homo Sapien
ILEFFGLK

SEQ ID NO: 655 - protein, 10 aa, Homo Sapien
NFEDVAFDEK

SEQ ID NO: 656 - protein, 9 aa, Homo Sapien
NNFEGEVTK

SEQ ID NO: 657 - protein, 8 aa, Homo Sapien
VHSFPTLK

SEQ ID NO: 658 - protein, 12 aa, Homo Sapien
YQLDKDGVVLFK

SEQ ID NO: 659 - protein, 17 aa, Homo Sapien
HNQLPLVIEFTEQTAPK

SEQ ID NO: 660 - protein, 10 aa, Homo Sapien
LITLEEEMTK

SEQ ID NO: 661 - protein, 12 aa, Homo Sapien
MDSTANEVEAVK

SEQ ID NO: 662 - protein, 8 aa, Homo Sapien
QLAPIWDK

SEQ ID NO: 663 - protein, 9 aa, Homo Sapien
THILLFLPK

SEQ ID NO: 664 - protein, 10 aa, Homo Sapien
VGENADSQIK

SEQ ID NO: 665 - protein, 13 aa, Homo Sapien
YSDMIVAAIQAEK

SEQ ID NO: 666 - protein, 18 aa, Homo Sapien
DPDAQPGGELMLGGTDSK

SEQ ID NO: 667 - protein, 17 aa, Homo Sapien
ISVNNVLPVFDNLMQQK

SEQ ID NO: 668 - protein, 10 aa, Homo Sapien
QPGITFIAAK

SEQ ID NO: 669 - protein, 9 aa, Homo Sapien
MAIESAGFK

SEQ ID NO: 670 - protein, 15 aa, Homo Sapien
ALTVPELTQQVFDAK

SEQ ID NO: 671 - protein, 12 aa, Homo Sapien
ISVYYNEATGGK

SEQ ID NO: 672 - protein, 8 aa, Homo Sapien
GKEAPFTK

SEQ ID NO: 673 - protein, 19 aa, Homo Sapien
IGHENGEFQIFLDALDKIK

SEQ ID NO: 674 - protein, 11 aa, Homo Sapien
AELHLVHWNPK

SEQ ID NO: 675 - protein, 21 aa, Homo Sapien
EWGYASHNGPDHWHELFPNAK

SEQ ID NO: 676 - protein, 12 aa, Homo Sapien
GEFQIFLDALDK

SEQ ID NO: 677 - protein, 12 aa, Homo Sapien
GENQSPVELHTK

SEQ ID NO: 678 - protein, 13 aa, Homo Sapien
GPDHWHELFPNAK

SEQ ID NO: 679 - protein, 18 aa, Homo Sapien
HDPSLQPWSVSYDGGSAK

SEQ ID NO: 680 - protein, 17 aa, Homo Sapien
IGHENGEFQIFLDALDK

SEQ ID NO: 681 - protein, 16 aa, Homo Sapien
PSLQPWSVSYDGGSAK

SEQ ID NO: 682 - protein, 22 aa, Homo Sapien
QFHLHWGSSDDHGSEHTVDGVK

SEQ ID NO: 683 - protein, 9 aa, Homo Sapien
QSPVELHTK

SEQ ID NO: 684 - protein, 10 aa, Homo Sapien
SVSYDGGSAK

SEQ ID NO: 685 - protein, 12 aa, Homo Sapien
EPMTVSSDQMAK

SEQ ID NO: 686 - protein, 9 aa, Homo Sapien
TVSSDQMAK

SEQ ID NO: 687 - protein, 13 aa, Homo Sapien
YAAELHLVHWNPK

SEQ ID NO: 688 - protein, 11 aa, Homo Sapien
NLHALILVNNK

SEQ ID NO: 689 - protein, 11 aa, Homo Sapien
VSPGAFTPLVK

SEQ ID NO: 690 - protein, 12 aa, Homo Sapien
DSPSVWAAVPGK

SEQ ID NO: 691 - protein, 16 aa, Homo Sapien
TFVNITPAEVGVLVGK

SEQ ID NO: 692 - protein, 15 aa, Homo Sapien
KEENLADWYSQVITK

SEQ ID NO: 693 - protein, 30 aa, Homo Sapien
TGQEYKPGNPPAEIGQNISSNSSASILESK

SEQ ID NO: 694 - protein, 14 aa, Homo Sapien
NPEVGLKPVWYSPK

SEQ ID NO: 695 - protein, 8 aa, Homo Sapien
DNYSPGWK

SEQ ID NO: 696 - protein, 15 aa, Homo Sapien
EVIPVNVPEAQEEMK

SEQ ID NO: 697 - protein, 11 aa, Homo Sapien
LTVAENEAETK

SEQ ID NO: 698 - protein, 18 aa, Homo Sapien
NQGGGLSSSGAGEGQGPK

SEQ ID NO: 699 - protein, 13 aa, Homo Sapien
NSEPAGLETPEAK

SEQ ID NO: 700 - protein, 13 aa, Homo Sapien
AALLNQHYQVNFK

SEQ ID NO: 701 - protein, 15 aa, Homo Sapien
FPPEASGYLHIGHAK

SEQ ID NO: 702 - protein, 10 aa, Homo Sapien
LNLNNTVLSK

SEQ ID NO: 703 - protein, 11 aa, Homo Sapien
DNSTMGYMAAK

SEQ ID NO: 704 - protein, 10 aa, Homo Sapien
ELHINLIPNK

SEQ ID NO: 705 - protein, 10 aa, Homo Sapien
HIYYITGETK

SEQ ID NO: 706 - protein, 14 aa, Homo Sapien
YYTSASGDEMVSLK

SEQ ID NO: 707 - protein, 12 aa, Homo Sapien
ELISNSSDALDK

SEQ ID NO: 708 - protein, 15 aa, Homo Sapien
NPDDITNEEYGEFYK

SEQ ID NO: 709 - protein, 11 aa, Homo Sapien
EAQEKLEQAEK

SEQ ID NO: 710 - protein, 11 aa, Homo Sapien
YEEEIKLLEEK

SEQ ID NO: 711 - protein, 12 aa, Homo Sapien
KQLEEEQQALQK

SEQ ID NO: 712 - protein, 12 aa, Homo Sapien
EDEVEKYSESVK

SEQ ID NO: 713 - protein, 8 aa, Homo Sapien
GTEDEVEK

SEQ ID NO: 714 - protein, 18 aa, Homo Sapien
YKAISEELDNALNDITSL

SEQ ID NO: 715 - protein, 10 aa, Homo Sapien
LKGTEDEVEK

SEQ ID NO: 716 - protein, 14 aa, Homo Sapien
GTEDEVEKYSESVK

SEQ ID NO: 717 - protein, 12 aa, Homo Sapien
SLEAQADKYSTK

SEQ ID NO: 718 - protein, 11 aa, Homo Sapien
QLEEEQQALQK

SEQ ID NO: 719 - protein, 12 aa, Homo Sapien
QLEEEQQALQKK

SEQ ID NO: 720 - protein, 13 aa, Homo Sapien
TIDDLEDEVYAQK

SEQ ID NO: 721 - protein, 9 aa, Homo Sapien
SKEFAQIIK

SEQ ID NO: 722 - protein, 11 aa, Homo Sapien
IPVHPNDHVNK

SEQ ID NO: 723 - protein, 23 aa, Homo Sapien
THTQDAVPLTLGQEFSGYVQQVK

SEQ ID NO: 724 - protein, 21 aa, Homo Sapien
ETAIELGYLTAEQFDEWVKPK

SEQ ID NO: 725 - protein, 12 aa, Homo Sapien
AIEMLGGELGSK

SEQ ID NO: 726 - protein, 21 aa, Homo Sapien
SGLGELILPENEPGSSIMPGK

SEQ ID NO: 727 - protein, 15 aa, Homo Sapien
VAALTGLPFVTAPNK

SEQ ID NO: 728 - protein, 12 aa, Homo Sapien
KFGDPVVQSDMK

SEQ ID NO: 729 - protein, 14 aa, Homo Sapien
HWPFQVINDGDKPK

SEQ ID NO: 730 - protein, 15 aa, Homo Sapien
NQVALNPQNTVFDAK

SEQ ID NO: 731 - protein, 16 aa, Homo Sapien
SLHQAIEGDTSGDFLK

SEQ ID NO: 732 - protein, 11 aa, Homo Sapien
DAFVAIVQSVK

SEQ ID NO: 733 - protein, 9 aa, Homo Sapien
GELSGDFEK

SEQ ID NO: 734 - protein, 15 aa, Homo Sapien
LILGLMMPPAHYDAK

SEQ ID NO: 735 - protein, 8 aa, Homo Sapien
LVFDEYLK

SEQ ID NO: 736 - protein, 7 aa, Homo Sapien
KFDEALK

SEQ ID NO: 737 - protein, 12 aa, Homo Sapien
KSFEQISANITK

SEQ ID NO: 738 - protein, 11 aa, Homo Sapien
ALVFQPVAELK

SEQ ID NO: 739 - protein, 12 aa, Homo Sapien
DLQANVEHLVQK

SEQ ID NO: 740 - protein, 12 aa, Homo Sapien
SEWSDLLSDLQK

SEQ ID NO: 741 - protein, 11 aa, Homo Sapien
SFEQISANITK

SEQ ID NO: 742 - protein, 19 aa, Homo Sapien
VFFVHEGYQGLVDGGDHIK

SEQ ID NO: 743 - protein, 11 aa, Homo Sapien
NGKPITSEDIK

SEQ ID NO: 744 - protein, 21 aa, Homo Sapien
GQIEEAGWSYVGGWTGQGGSK

SEQ ID NO: 745 - protein, 10 aa, Homo Sapien
SFMNNWEVYK

SEQ ID NO: 746 - protein, 13 aa, Homo Sapien
VLVVHDGFEGLAK

SEQ ID NO: 747 - protein, 16 aa, Homo Sapien
IEDVGSDEEDDSGKDK

SEQ ID NO: 748 - protein, 16 aa, Homo Sapien
KHSQFIGYPITLYLEK

SEQ ID NO: 749 - protein, 16 aa, Homo Sapien
KHSQFLGYPITLYLEK

SEQ ID NO: 750 - protein, 11 aa, Homo Sapien
DNSTMGYMMAK

SEQ ID NO: 751 - protein, 12 aa, Homo Sapien
ELISNASDALDK

SEQ ID NO: 752 - protein, 15 aa, Homo Sapien
HSQFIGYPITLYLEK

SEQ ID NO: 753 - protein, 15 aa, Homo Sapien
HSQFLGYPITLYLEK

SEQ ID NO: 754 - protein, 15 aa, Homo Sapien
NPDDITQEEYGEFYK

SEQ ID NO: 755 - protein, 10 aa, Homo Sapien
SIYYITGESK

SEQ ID NO: 756 - protein, 10 aa, Homo Sapien
MELKADQLYK

SEQ ID NO: 757 - protein, 10 aa, Homo Sapien
SKSDPIMLLK

SEQ ID NO: 758 - protein, 9 aa, Homo Sapien
AAASTDYYK

SEQ ID NO: 759 - protein, 11 aa, Homo Sapien
FANDATFEIKK

SEQ ID NO: 760 - protein, 14 aa, Homo Sapien
IKIEFTPEQIEEFK

SEQ ID NO: 761 - protein, 8 aa, Homo Sapien
EVEFDASK

SEQ ID NO: 762 - protein, 12 aa, Homo Sapien
IEFTPEQIEEFK

SEQ ID NO: 763 - protein, 8 aa, Homo Sapien
LTEDEVEK

SEQ ID NO: 764 - protein, 16 aa, Homo Sapien
MMDFETFLPMLQHISK

SEQ ID NO: 765 - protein, 15 aa, Homo Sapien
ETNLDSLPLVDTHSK

SEQ ID NO: 766 - protein, 19 aa, Homo Sapien
LLQDSVDFSLADAINTEFK

SEQ ID NO: 767 - protein, 14 aa, Homo Sapien
ILLAELEQLKGQGK

SEQ ID NO: 768 - protein, 13 aa, Homo Sapien
KVESLQEEIAFLK

SEQ ID NO: 769 - protein, 10 aa, Homo Sapien
ILLAELEQLK

SEQ ID NO: 770 - protein, 10 aa, Homo Sapien
NLQEAEEWYK

SEQ ID NO: 771 - protein, 9 aa, Homo Sapien
QQYESVAAK

SEQ ID NO: 772 - protein, 9 aa, Homo Sapien
QVDQLTNDK

SEQ ID NO: 773 - protein, 13 aa, Homo Sapien
DLLDDLKSELTGK

SEQ ID NO: 774 - protein, 25 aa, Homo Sapien
DPDAGIDEAQVEQDAQALFQAGELK

SEQ ID NO: 775 - protein, 15 aa, Homo Sapien
ETSGNLEQLLLAVVK

SEQ ID NO: 776 - protein, 15 aa, Homo Sapien
SIPAYLAETLYYAMK

SEQ ID NO: 777 - protein, 11 aa, Homo Sapien
NFATSLYSMIK

SEQ ID NO: 778 - protein, 9 aa, Homo Sapien
DAETWFLSK

SEQ ID NO: 779 - protein, 9 aa, Homo Sapien
DQYEQMAEK

SEQ ID NO: 780 - protein, 9 aa, Homo Sapien
DGKYDLDFK

SEQ ID NO: 781 - protein, 13 aa, Homo Sapien
GNPTVEVDLYTAK

SEQ ID NO: 782 - protein, 18 aa, Homo Sapien
YISLIYTNYEAGKDDYVK

SEQ ID NO: 783 - protein, 26 aa, Homo Sapien
MLLADQGQSWKEEVVTVETWQEGSLK

SEQ ID NO: 784 - protein, 20 aa, Homo Sapien
ALPGQLKPFETLLSQNQGGK

SEQ ID NO: 785 - protein, 11 aa, Homo Sapien
MLLADQGQSWK

SEQ ID NO: 786 - protein, 16 aa, Homo Sapien
LNLEAINYMAADGDFK

SEQ ID NO: 787 - protein, 16 aa, Homo Sapien
AALDGTPGMIGYGMAK

SEQ ID NO: 788 - protein, 15 aa, Homo Sapien
QSIWTSTISSHLATK

SEQ ID NO: 789 - protein, 11 aa, Homo Sapien
EGGLLTLAGAK

SEQ ID NO: 790 - protein, 17 aa, Homo Sapien
LGLDFPNLPYLIDGAHK

SEQ ID NO: 791 - protein, 10 aa, Homo Sapien
LKGTEDELDK

SEQ ID NO: 792 - protein, 13 aa, Homo Sapien
SKQLEDELVSLQK

SEQ ID NO: 793 - protein, 11 aa, Homo Sapien
QLEDELVSLQK

SEQ ID NO: 794 - protein, 12 aa, Homo Sapien
QLEDELVSLQKK

SEQ ID NO: 795 - protein, 13 aa, Homo Sapien
SIDDLEDELYAQK

SEQ ID NO: 796 - protein, 13 aa, Homo Sapien
SEEQLKEEGIEYK

SEQ ID NO: 797 - protein, 24 aa, Homo Sapien
ADQPIDADVTVIGSGPGGYVAAIK

SEQ ID NO: 798 - protein, 15 aa, Homo Sapien
ALLNNSHYYHMAHGK

SEQ ID NO: 799 - protein, 11 aa, Homo Sapien
ALTGGIAHLFK

SEQ ID NO: 800 - protein, 19 aa, Homo Sapien
IPNIYAIGDVVAGPMLAHK

SEQ ID NO: 801 - protein, 9 aa, Homo Sapien
TGGIAHLFK

SEQ ID NO: 802 - protein, 10 aa, Homo Sapien
TNADTDGMVK

SEQ ID NO: 803 - protein, 14 aa, Homo Sapien
KPPLLNNADSVQAK

SEQ ID NO: 804 - protein, 20 aa, Homo Sapien
GGAAVDPDSGLEHSAHVLEK

SEQ ID NO: 805 - protein, 11 aa, Homo Sapien
TLGDFAAEYAK

SEQ ID NO: 806 - protein, 15 aa, Homo Sapien
VVSEDFLQDVSASTK

SEQ ID NO: 807 - protein, 14 aa, Homo Sapien
GSPMEISLPIALSK

SEQ ID NO: 808 - protein, 13 aa, Homo Sapien
SAYEFSETESMLK

SEQ ID NO: 809 - protein, 17 aa, Homo Sapien
ALSDHHVYLEGTLLKPN

SEQ ID NO: 810 - protein, 24 aa, Homo Sapien
ALSDHHVYLEGTLLKPNMVTPGHA

SEQ ID NO: 811 - protein, 15 aa, Homo Sapien
VLSLAQEQVGGSPEK

SEQ ID NO: 812 - protein, 19 aa, Homo Sapien
AAPSVTLFPPSSEELQANK

SEQ ID NO: 813 - protein, 10 aa, Homo Sapien
AGVETTTPSK

SEQ ID NO: 814 - protein, 15 aa, Homo Sapien
YAASSYLSLTPEQWK

SEQ ID NO: 815 - protein, 11 aa, Homo Sapien
MQIFVKTLTGK

SEQ ID NO: 816 - protein, 18 aa, Homo Sapien
TITLEVEPSDTIENVKAK

SEQ ID NO: 817 - protein, 16 aa, Homo Sapien
TITLEVEPSDTIENVK

SEQ ID NO: 818 - protein, 9 aa, Homo Sapien
TLSDYNIQK

SEQ ID NO: 819 - protein, 15 aa, Homo Sapien
GVETIANDVVSLATK

SEQ ID NO: 820 - protein, 8 aa, Homo Sapien
VFVSPLAK

SEQ ID NO: 821 - protein, 9 aa, Homo Sapien
ISVNDFIIK

SEQ ID NO: 822 - protein, 9 aa, Homo Sapien
VGEFSGANK

SEQ ID NO: 823 - protein, 12 aa, Homo Sapien
KGLDPYNVLAPK

SEQ ID NO: 824 - protein, 16 aa, Homo Sapien
IGSLDNITHVPGGGNK

SEQ ID NO: 825 - protein, 19 aa, Homo Sapien
HVPGGGSVQIVYKPVDLSK

SEQ ID NO: 826 - protein, 8 aa, Homo Sapien
HNIQALLK

SEQ ID NO: 827 - protein, 8 aa, Homo Sapien
MYEEFLSK

SEQ ID NO: 828 - protein, 17 aa, Homo Sapien
LTVADALEPVQFEDGQK

SEQ ID NO: 829 - protein, 19 aa, Homo Sapien
IQEIIEQLDVTTSEYEKEK

SEQ ID NO: 830 - protein, 23 aa, Homo Sapien
QSKPVTTPEEIAQVATISANGDK

SEQ ID NO: 831 - protein, 8 aa, Homo Sapien
IPAMTIAK

SEQ ID NO: 832 - protein, 9 aa, Homo Sapien
LSDGVAVLK

SEQ ID NO: 833 - protein, 15 aa, Homo Sapien
VGEVIVTKDDAMLLK

SEQ ID NO: 834 - protein, 12 aa, Homo Sapien
GYISPYFINTSK

SEQ ID NO: 835 - protein, 12 aa, Homo Sapien
NAGVEGSLIVEK

SEQ ID NO: 836 - protein, 13 aa, Homo Sapien
TLNDELEIIEGMK

SEQ ID NO: 837 - protein, 12 aa, Homo Sapien
TVIIEQSWGSPK

SEQ ID NO: 838 - protein, 8 aa, Homo Sapien
VGEVIVTK

SEQ ID NO: 839 - protein, 12 aa, Homo Sapien
VGGTSDVEVNEK

SEQ ID NO: 840 - protein, 13 aa, Homo Sapien
VGGTSDVEVNEKK

SEQ ID NO: 841 - protein, 9 aa, Homo Sapien
VGLQVVAVK

SEQ ID NO: 842 - protein, 11 aa, Homo Sapien
VHIITHGEEKD

SEQ ID NO: 843 - protein, 27 aa, Homo Sapien
NEEIDEMIKEAPGPINFTVFLTMFGEK

SEQ ID NO: 844 - protein, 24 aa, Homo Sapien
FSKEEVDQMFAAFPPDVTGNLDYK

SEQ ID NO: 845 - protein, 15 aa, Homo Sapien
LKGADPEETILNAFK

SEQ ID NO: 846 - protein, 20 aa, Homo Sapien
EAPGPINFTVFLTMFGEKLK

SEQ ID NO: 847 - protein, 13 aa, Homo Sapien
VNVKNEEIDEMIK

SEQ ID NO: 848 - protein, 21 aa, Homo Sapien
AGGANSNVFSMFEQTQIQEFK

SEQ ID NO: 849 - protein, 18 aa, Homo Sapien
EAPGPINFTVFLTMFGEK

SEQ ID NO: 850 - protein, 21 aa, Homo Sapien
EEVDQMFAAFPPDVTGNLDYK

SEQ ID NO: 851 - protein, 13 aa, Homo Sapien
GADPEETILNAFK

SEQ ID NO: 852 - protein, 9 aa, Homo Sapien
NEEIDEMIK

SEQ ID NO: 853 - protein, 10 aa, Homo Sapien
PEETILNAFK

SEQ ID NO: 854 - protein, 12 aa, Homo Sapien
ELEEIVQPIISK

SEQ ID NO: 855 - protein, 11 aa, Homo Sapien
NELESYAYSLK

SEQ ID NO: 856 - protein, 15 aa, Homo Sapien
NQLTSNPENTVFDAK

SEQ ID NO: 857 - protein, 17 aa, Homo Sapien
SQIFSTASDNQPTVTIK

SEQ ID NO: 858 - protein, 12 aa, Homo Sapien
TWNDPSVQQDIK

SEQ ID NO: 859 - protein, 17 aa, Homo Sapien
EAQQALGSAAADATEAK

SEQ ID NO: 860 - protein, 13 aa, Homo Sapien
LNTFGDEVFNDPK

SEQ ID NO: 861 - protein, 19 aa, Homo Sapien
VSVPLIAQGNSYPSETTVK

SEQ ID NO: 862 - protein, 17 aa, Homo Sapien
VKNLTEELSGLDETIAK

SEQ ID NO: 863 - protein, 14 aa, Homo Sapien
SFYPEEVSSMVLTK

SEQ ID NO: 864 - protein, 15 aa, Homo Sapien
NQVAMNPTNTVFDAK

SEQ ID NO: 865 - protein, 11 aa, Homo Sapien
NSLESYAFNMK

SEQ ID NO: 866 - protein, 12 aa, Homo Sapien
VTGADVPMPYAK

SEQ ID NO: 867 - protein, 16 aa, Homo Sapien
VFLLGEEVAQYDGAYK

SEQ ID NO: 868 - protein, 11 aa, Homo Sapien
VVSPWNSEDAK

SEQ ID NO: 869 - protein, 12 aa, Homo Sapien
ILKEDILNYLEK

SEQ ID NO: 870 - protein, 12 aa, Homo Sapien
GLAGVENVTELK

SEQ ID NO: 871 - protein, 13 aa, Homo Sapien
GLAGVENVTELKK

SEQ ID NO: 872 - protein, 10 aa, Homo Sapien
PNSLFDIQVK

SEQ ID NO: 873 - protein, 14 aa, Homo Sapien
QVIEQLSSGFFSPK

SEQ ID NO: 874 - protein, 9 aa, Homo Sapien
VENVTELKK

SEQ ID NO: 875 - protein, 10 aa, Homo Sapien
VFADYEDYIK

SEQ ID NO: 876 - protein, 14 aa, Homo Sapien
VHINPNSLFDIQVK

SEQ ID NO: 877 - protein, 13 aa, Homo Sapien
TIFKDFYELEPHK

SEQ ID NO: 878 - protein, 13 aa, Homo Sapien
DFYELEPHKFQNK

SEQ ID NO: 879 - protein, 8 aa, Homo Sapien
APNDFNLK

SEQ ID NO: 880 - protein, 9 aa, Homo Sapien
DFYELEPHK

SEQ ID NO: 881 - protein, 8 aa, Homo Sapien
HLHFTLVK

SEQ ID NO: 882 - protein, 7 aa, Homo Sapien
IHSEILK

SEQ ID NO: 883 - protein, 10 aa, Homo Sapien
MSLVEEGAVK

SEQ ID NO: 884 - protein, 9 aa, Homo Sapien
TNFDAFPDK

SEQ ID NO: 885 - protein, 25 aa, Homo Sapien
VIPAADLSEQISTAGTEASGTGNMK

SEQ ID NO: 886 - protein, 12 aa, Homo Sapien
VLYPNDNFFEGK

SEQ ID NO: 887 - protein, 9 aa, Homo Sapien
YEFGIFNQK

SEQ ID NO: 888 - protein, 18 aa, Homo Sapien
LVAQDNFGYDLAAVEAAK

SEQ ID NO: 889 - protein, 11 aa, Homo Sapien
GIVFEDVKVPK

SEQ ID NO: 890 - protein, 31 aa, Homo Sapien
AFAGDIANQLATDAVQILGGNGFNTEYPVEK

SEQ ID NO: 891 - protein, 12 aa, Homo Sapien
ENVLIGDGAGFK

SEQ ID NO: 892 - protein, 18 aa, Homo Sapien
LLVEHQAISFMLAEMAMK

SEQ ID NO: 893 - protein, 8 aa, Homo Sapien
VAMGAFDK

SEQ ID NO: 894 - protein, 14 aa, Homo Sapien
AYVEANQMLGDLIK

SEQ ID NO: 895 - protein, 22 aa, Homo Sapien
LDNASAFQGAVISPHYDSLLVK

SEQ ID NO: 896 - protein, 16 aa, Homo Sapien
QGEIEAQIKDLGQLEK

SEQ ID NO: 897 - protein, 18 aa, Homo Sapien
IHTTGFKDQNEMLSSLQK

SEQ ID NO: 898 - protein, 10 aa, Homo Sapien
EGNFSDLKEK

SEQ ID NO: 899 - protein, 27 aa, Homo Sapien
NQLEIYNQPNQEGPFDVKETEIAVQAK

SEQ ID NO: 900 - protein, 10 aa, Homo Sapien
KIQNHIQTLK

SEQ ID NO: 901 - protein, 10 aa, Homo Sapien
KLEDLSSEWK

SEQ ID NO: 902 - protein, 26 aa, Homo Sapien
QLNETGGPVLVSAPISPEEQDKLENK

SEQ ID NO: 903 - protein, 16 aa, Homo Sapien
QKLLEQSIQSAQETEK

SEQ ID NO: 904 - protein, 15 aa, Homo Sapien
LLDLLEGLTGQKLPK

SEQ ID NO: 905 - protein, 8 aa, Homo Sapien
KLQDVSMK

SEQ ID NO: 906 - protein, 16 aa, Homo Sapien
VKLQEALSQLDFQWEK

SEQ ID NO: 907 - protein, 13 aa, Homo Sapien
LYSLKQDLLSTLK

SEQ ID NO: 908 - protein, 31 aa, Homo Sapien
AKQPDLAPGLTTIGASPTQTVTLVTQPVVTK

SEQ ID NO: 909 - protein, 12 aa, Homo Sapien
KTQIPENWEHAK

SEQ ID NO: 910 - protein, 9 aa, Homo Sapien
DAELIAEAK

SEQ ID NO: 911 - protein, 11 aa, Homo Sapien
EGPYTVDAIQK

SEQ ID NO: 912 - protein, 19 aa, Homo Sapien
GQGPMFLDADFVAFTNHFK

SEQ ID NO: 913 - protein, 20 aa, Homo Sapien
GSWQPVGDLLIDSLQDHLEK

SEQ ID NO: 914 - protein, 13 aa, Homo Sapien
HAQEELPPPPPQK

SEQ ID NO: 915 - protein, 13 aa, Homo Sapien
IFLTEQPLEGLEK

SEQ ID NO: 916 - protein, 26 aa, Homo Sapien
LGELQALQSSLQEQQSGLYYLSTTVK

SEQ ID NO: 917 - protein, 15 aa, Homo Sapien
LLDPEDVDTTYPDKK

SEQ ID NO: 918 - protein, 14 aa, Homo Sapien
LLEQSIQSAQETEK

SEQ ID NO: 919 - protein, 23 aa, Homo Sapien
LLTESVNSVIAQAPPVAQEALKK

SEQ ID NO: 920 - protein, 22 aa, Homo Sapien
LLVSDIQTIQPSLNSVNEGGQK

SEQ ID NO: 921 - protein, 14 aa, Homo Sapien
LQELQEATDELDLK

SEQ ID NO: 922 - protein, 18 aa, Homo Sapien
NQLEIYNQPNQEGPFDVK

SEQ ID NO: 923 - protein, 23 aa, Homo Sapien
QAEGLSEDGAAMAVEPTQIQLSK

SEQ ID NO: 924 - protein, 29 aa, Homo Sapien
QPDLAPGLTTIGASPTQTVTLVTQPVVTK

SEQ ID NO: 925 - protein, 25 aa, Homo Sapien
QWQDLQGEIEAHTDVYHNLDENSQK

SEQ ID NO: 926 - protein, 15 aa, Homo Sapien
QWQTNVDVANDLALK

SEQ ID NO: 927 - protein, 20 aa, Homo Sapien
SAQALVEQMVNEGVNADSIK

SEQ ID NO: 928 - protein, 14 aa, Homo Sapien
SPFPSQHLEAPEDK

SEQ ID NO: 929 - protein, 9 aa, Homo Sapien
TDASILQEK

SEQ ID NO: 930 - protein, 11 aa, Homo Sapien
TQIPENWEHAK

SEQ ID NO: 931 - protein, 23 aa, Homo Sapien
VLQNNNVDLVNIGSTDIVDGNHK

SEQ ID NO: 932 - protein, 10 aa, Homo Sapien
VLSQIDVAQK

SEQ ID NO: 933 - protein, 7 aa, Homo Sapien
YQLGIEK

SEQ ID NO: 934 - protein, 17 aa, Homo Sapien
ASIPLKELEQFNSDIQK

SEQ ID NO: 935 - protein, 17 aa, Homo Sapien
IQSDLTSHEISLEEMKK

SEQ ID NO: 936 - protein, 9 aa, Homo Sapien
LHYNELGAK

SEQ ID NO: 937 - protein, 12 aa, Homo Sapien
LLDLLEGLTGQK

SEQ ID NO: 938 - protein, 11 aa, Homo Sapien
LLQQFPLDLEK

SEQ ID NO: 939 - protein, 18 aa, Homo Sapien
SAVEGMPSNLDSEVAWGK

SEQ ID NO: 940 - protein, 15 aa, Homo Sapien
TLNATGEEIIQQSSK

SEQ ID NO: 941 - protein, 11 aa, Homo Sapien
VLSQIDVAQKK

SEQ ID NO: 942 - protein, 15 aa, Homo Sapien
VMVGDLEDINEMIIK

SEQ ID NO: 943 - protein, 15 aa, Homo Sapien
AAQAPSSFQLLYDLK

SEQ ID NO: 944 - protein, 14 aa, Homo Sapien
MFGIPVVVAVNAFK

SEQ ID NO: 945 - protein, 16 aa, Homo Sapien
MHGGGPTVTAGLPLPK

SEQ ID NO: 946 - protein, 11 aa, Homo Sapien
QPSQGPTFGIK

SEQ ID NO: 947 - protein, 9 aa, Homo Sapien
TTTESEVMK

SEQ ID NO: 948 - protein, 16 aa, Homo Sapien
YVVVTGITPTPLGEGK

SEQ ID NO: 949 - protein, 10 aa, Homo Sapien
IFHELTQTDK

SEQ ID NO: 950 - protein, 8 aa, Homo Sapien
GTAFGGWK

SEQ ID NO: 951 - protein, 22 aa, Homo Sapien
AAVAWEAGKPLSIEEIEVAPPK

SEQ ID NO: 952 - protein, 22 aa, Homo Sapien
IGDYVQQHGGVSLVEQLLQDPK

SEQ ID NO: 953 - protein, 16 aa, Homo Sapien
GLEQLLVGGSHLKENK

SEQ ID NO: 954 - protein, 14 aa, Homo Sapien
KGLEQLLVGGSHLK

SEQ ID NO: 955 - protein, 11 aa, Homo Sapien
EQLLVGGSHLK

SEQ ID NO: 956 - protein, 13 aa, Homo Sapien
GLEQLLVGGSHLK

SEQ ID NO: 957 - protein, 19 aa, Homo Sapien
LLLFSDGNSQGATPAAIEK

SEQ ID NO: 958 - protein, 11 aa, Homo Sapien
LFAVAPNQNLK

SEQ ID NO: 959 - protein, 16 aa, Homo Sapien
NLEWIAGGTWTPSALK

SEQ ID NO: 960 - protein, 11 aa, Homo Sapien
IAVAQYSDDVK

SEQ ID NO: 961 - protein, 16 aa, Homo Sapien
IEDGVPQHLVLVLGGK

SEQ ID NO: 962 - protein, 16 aa, Homo Sapien
IEEGVPQFLVLISSGK

SEQ ID NO: 963 - protein, 13 aa, Homo Sapien
IGDLHPQIVNLLK

SEQ ID NO: 964 - protein, 15 aa, Homo Sapien
LLTPITTLTSEQIQK

SEQ ID NO: 965 - protein, 9 aa, Homo Sapien
LLVLITGGK

SEQ ID NO: 966 - protein, 16 aa, Homo Sapien
LQPVLQPLPSPGVGGK

SEQ ID NO: 967 - protein, 25 aa, Homo Sapien
NADPAELEQIVLSPAFILAAESLPK

SEQ ID NO: 968 - protein, 9 aa, Homo Sapien
NLQVALTSK

SEQ ID NO: 969 - protein, 12 aa, Homo Sapien
QSGVVPFIFQAK

SEQ ID NO: 970 - protein, 13 aa, Homo Sapien
SDDEVDDPAVELK

SEQ ID NO: 971 - protein, 17 aa, Homo Sapien
VGVVQFSNDVFPEFYLK

SEQ ID NO: 972 - protein, 12 aa, Homo Sapien
VPQIAFVITGGK

SEQ ID NO: 973 - protein, 10 aa, Homo Sapien
GVVPFIFQAK

SEQ ID NO: 974 - protein, 12 aa, Homo Sapien
VKLLLQVQHASK

SEQ ID NO: 975 - protein, 13 aa, Homo Sapien
DFLAGGVAAAVSK

SEQ ID NO: 976 - protein, 14 aa, Homo Sapien
YFPTQALNFAFKDK

SEQ ID NO: 977 - protein, 11 aa, Homo Sapien
AAYFGVYDTAK

SEQ ID NO: 978 - protein, 16 aa, Homo Sapien
GMGGAFVLVLYDEIKK

SEQ ID NO: 979 - protein, 16 aa, Homo Sapien
GMGGAFVLVLYDELKK

SEQ ID NO: 980 - protein, 10 aa, Homo Sapien
LLLQVQHASK

SEQ ID NO: 981 - protein, 10 aa, Homo Sapien
VLVLYDEIKK

SEQ ID NO: 982 - protein, 10 aa, Homo Sapien
VLVLYDELKK

SEQ ID NO: 983 - protein, 12 aa, Homo Sapien
YFPTQALNFAFK

SEQ ID NO: 984 - protein, 19 aa, Homo Sapien
FGVPVIADGGIQNVGHIAK

SEQ ID NO: 985 - protein, 17 aa, Homo Sapien
LGFSEVELVQMVVDGVK

SEQ ID NO: 986 - protein, 10 aa, Homo Sapien
PFSNSHNALK

SEQ ID NO: 987 - protein, 28 aa, Homo Sapien
EEQAEPDGTEVADKAAYLQNLNSADLLK

SEQ ID NO: 988 - protein, 21 aa, Homo Sapien
TEAGATVTVKDDQVFPMNPPK

SEQ ID NO: 989 - protein, 12 aa, Homo Sapien
IAEKDEEIDQMK

SEQ ID NO: 990 - protein, 14 aa, Homo Sapien
TSVFVVDPKESFVK

SEQ ID NO: 991 - protein, 26 aa, Homo Sapien
QVEQEKSELQAALEEAEASLEHEEGK

SEQ ID NO: 992 - protein, 24 aa, Homo Sapien
SAMKTLALLFVGATGAEAEAGGGK

SEQ ID NO: 993 - protein, 10 aa, Homo Sapien
ALEDQLSEIK

SEQ ID NO: 994 - protein, 10 aa, Homo Sapien
EFEMSGLQSK

SEQ ID NO: 995 - protein, 15 aa, Homo Sapien
QAEEAEEQSNVNLSK

SEQ ID NO: 996 - protein, 20 aa, Homo Sapien
TLALLFVGATGAEAEAGGGK

SEQ ID NO: 997 - protein, 21 aa, Homo Sapien
TLALLFVGATGAEAEAGGGKK

SEQ ID NO: 998 - protein, 18 aa, Homo Sapien
LLGSIDIDHTQYKFGHTK

SEQ ID NO: 999 - protein, 9 aa, Homo Sapien
EVHTKIISE

SEQ ID NO: 1000 - protein, 17 aa, Homo Sapien
ASEKLLGSIDIDHTQYK

SEQ ID NO: 1001 - protein, 19 aa, Homo Sapien
LAQESTMDIENDKQQLDEK

SEQ ID NO: 1002 - protein, 14 aa, Homo Sapien
AAYLQNLNSADLLK

SEQ ID NO: 1003 - protein, 13 aa, Homo Sapien
IEDEQALGMQLQK

SEQ ID NO: 1004 - protein, 14 aa, Homo Sapien
IEDEQALGMQLQKK

SEQ ID NO: 1005 - protein, 13 aa, Homo Sapien
LAQESTMDIENDK

SEQ ID NO: 1006 - protein, 13 aa, Homo Sapien
LLGSIDIDHTQYK

SEQ ID NO: 1007 - protein, 14 aa, Homo Sapien
LQDAEEHVEAVNAK

SEQ ID NO: 1008 - protein, 15 aa, Homo Sapien
MEIDDLASNMETVSK

SEQ ID NO: 1009 - protein, 14 aa, Homo Sapien
NAYEESLDQLETLK

SEQ ID NO: 1010 - protein, 20 aa, Homo Sapien
SELQAALEEAEASLEHEEGK

SEQ ID NO: 1011 - protein, 9 aa, Homo Sapien
QLEEEVKAK

SEQ ID NO: 1012 - protein, 16 aa, Homo Sapien
TVTVKEDQVMQQNPPK

SEQ ID NO: 1013 - protein, 14 aa, Homo Sapien
EDQVMQQNPPKFDK

SEQ ID NO: 1014 - protein, 20 aa, Homo Sapien
LLSTLFANYAGADAPIEKGK

SEQ ID NO: 1015 - protein, 24 aa, Homo Sapien
VGNEYVTKGQNVQQVIYATGALAK

SEQ ID NO: 1016 - protein, 27 aa, Homo Sapien
DQSPGKGTLEDQIIQANPALEAFGNAK

SEQ ID NO: 1017 - protein, 23 aa, Homo Sapien
GKGTLEDQIIQANPALEAFGNAK

SEQ ID NO: 1018 - protein, 25 aa, Homo Sapien
SPGKGTLEDQIIQANPALEAFGNAK

SEQ ID NO: 1019 - protein, 23 aa, Homo Sapien
FDKIEDMAMLTFLHEPAVLYNLK

SEQ ID NO: 1020 - protein, 17 aa, Homo Sapien
GAEKLLSSLDIDHNQYK

SEQ ID NO: 1021 - protein, 22 aa, Homo Sapien
SSLKLLSTLFANYAGADAPIEK

SEQ ID NO: 1022 - protein, 26 aa, Homo Sapien
QLEAEKMELQSALEEAEASLEHEEGK

SEQ ID NO: 1023 - protein, 21 aa, Homo Sapien
ENKNLQEEISDLTEQLGSSGK

SEQ ID NO: 1024 - protein, 13 aa, Homo Sapien
DVFVPDDKQEFVK

SEQ ID NO: 1025 - protein, 28 aa, Homo Sapien
EEQAEPDGTEEADKSAYLMGLNSADLLK

SEQ ID NO: 1026 - protein, 25 aa, Homo Sapien
ALQEAHQQALDDLQAEEDKVNTLTK

SEQ ID NO: 1027 - protein, 13 aa, Homo Sapien
EGGKVTAETEYGK

SEQ ID NO: 1028 - protein, 12 aa, Homo Sapien
DYHIFYQILSNK

SEQ ID NO: 1029 - protein, 11 aa, Homo Sapien
EDQVMQQNPPK

SEQ ID NO: 1030 - protein, 14 aa, Homo Sapien
EEQAEPDGTEEADK

SEQ ID NO: 1031 - protein, 11 aa, Homo Sapien
ELENELEAEQK

SEQ ID NO: 1032 - protein, 7 aa, Homo Sapien
FDNHLGK

SEQ ID NO: 1033 - protein, 16 aa, Homo Sapien
GQNVQQVIYATGALAK

SEQ ID NO: 1034 - protein, 13 aa, Homo Sapien
IEDEQALGSQLQK

SEQ ID NO: 1035 - protein, 14 aa, Homo Sapien
IEDEQALGSQLQKK

SEQ ID NO: 1036 - protein, 20 aa, Homo Sapien
IEDMAMLTFLHEPAVLYNLK

SEQ ID NO: 1037 - protein, 8 aa, Homo Sapien
LFDNHLGK

SEQ ID NO: 1038 - protein, 18 aa, Homo Sapien
LLSTLFANYAGADAPIEK

SEQ ID NO: 1039 - protein, 14 aa, Homo Sapien
LQEAEEAVEAVNAK

SEQ ID NO: 1040 - protein, 12 aa, Homo Sapien
LTGAIMHFGNMK

SEQ ID NO: 1041 - protein, 11 aa, Homo Sapien
LTYTQQLEDLK

SEQ ID NO: 1042 - protein, 20 aa, Homo Sapien
MELQSALEEAEASLEHEEGK

SEQ ID NO: 1043 - protein, 18 aa, Homo Sapien
NLQEEISDLTEQLGSSGK

SEQ ID NO: 1044 - protein, 9 aa, Homo Sapien
VTAETEYGK

SEQ ID NO: 1045 - protein, 14 aa, Homo Sapien
EEASGSSVTAEEAK

SEQ ID NO: 1046 - protein, 11 aa, Homo Sapien
SQLDIIIHSLK

SEQ ID NO: 1047 - protein, 9 aa, Homo Sapien
TLFPLIEAK

SEQ ID NO: 1048 - protein, 11 aa, Homo Sapien
ASWSSLSMDEK

SEQ ID NO: 1049 - protein, 11 aa, Homo Sapien
DHPLPEVAHVK

SEQ ID NO: 1050 - protein, 10 aa, Homo Sapien
VNPIQGLASK

SEQ ID NO: 1051 - protein, 12 aa, Homo Sapien
LAEKDEEMEQAK

SEQ ID NO: 1052 - protein, 18 aa, Homo Sapien
VKLEQQVDDLEGSLEQEK

SEQ ID NO: 1053 - protein, 13 aa, Homo Sapien
YEESQSELESSQK

SEQ ID NO: 1054 - protein, 14 aa, Homo Sapien
LQDAEEAVEAVNAK

SEQ ID NO: 1055 - protein, 10 aa, Homo Sapien
NFDKVLSEWK

SEQ ID NO: 1056 - protein, 13 aa, Homo Sapien
EGIPALDNFLDKL

SEQ ID NO: 1057 - protein, 9 aa, Homo Sapien
VFDAIMNFK

SEQ ID NO: 1058 - protein, 11 aa, Homo Sapien
VFSGLVSTGLK

SEQ ID NO: 1059 - protein, 12 aa, Homo Sapien
EGIPALDNFLDK

SEQ ID NO: 1060 - protein, 18 aa, Homo Sapien
GHVFEESQVAGTPMFVVK

SEQ ID NO: 1061 - protein, 9 aa, Homo Sapien
GPLMMYISK

SEQ ID NO: 1062 - protein, 9 aa, Homo Sapien
GVQYLNEIK

SEQ ID NO: 1063 - protein, 10 aa, Homo Sapien
IMGPNYTPGK

SEQ ID NO: 1064 - protein, 11 aa, Homo Sapien
IMGPNYTPGKK

SEQ ID NO: 1065 - protein, 12 aa, Homo Sapien
NMSVIAHVDHGK

SEQ ID NO: 1066 - protein, 9 aa, Homo Sapien
QFAEMYVAK

SEQ ID NO: 1067 - protein, 10 aa, Homo Sapien
KDAEAWFNEK

SEQ ID NO: 1068 - protein, 19 aa, Homo Sapien
SKELTTEIDNNIEQISSYK

SEQ ID NO: 1069 - protein, 7 aa, Homo Sapien
IKEWYEK

SEQ ID NO: 1070 - protein, 15 aa, Homo Sapien
SSSSGSVGESSSKGP

SEQ ID NO: 1071 - protein, 18 aa, Homo Sapien
ADLEMQIESLTEELAYLK

SEQ ID NO: 1072 - protein, 12 aa, Homo Sapien
ALEESNYELEGK

SEQ ID NO: 1073 - protein, 9 aa, Homo Sapien
DAEAWFNEK

SEQ ID NO: 1074 - protein, 10 aa, Homo Sapien
EESNYELEGK

SEQ ID NO: 1075 - protein, 17 aa, Homo Sapien
ELTTEIDNNIEQISSYK

SEQ ID NO: 1076 - protein, 16 aa, Homo Sapien
NVQALEIELQSQLALK

SEQ ID NO: 1077 - protein, 9 aa, Homo Sapien
VLDELTLTK

SEQ ID NO: 1078 - protein, 10 aa, Homo Sapien
LAELEEALQK

SEQ ID NO: 1079 - protein, 10 aa, Homo Sapien
NMQDLVEDFK

SEQ ID NO: 1080 - protein, 9 aa, Homo Sapien
SLYNLGGSK

SEQ ID NO: 1081 - protein, 10 aa, Homo Sapien
TEAESWYQTK

SEQ ID NO: 1082 - protein, 11 aa, Homo Sapien
TTAENEFVMLK

SEQ ID NO: 1083 - protein, 14 aa, Homo Sapien
DLISHDEMFSDIYK

SEQ ID NO: 1084 - protein, 7 aa, Homo Sapien
HILANFK

SEQ ID NO: 1085 - protein, 47 aa, Homo Sapien
TEGNIDDSLIGGNASAEGPEGEGTESTVITGVDIVMNHHLQETSFTK

SEQ ID NO: 1086 - protein, 13 aa, Homo Sapien
VKPFMTGAAEQIK

SEQ ID NO: 1087 - protein, 9 aa, Homo Sapien
VGFLPSAGK

SEQ ID NO: 1088 - protein, 16 aa, Homo Sapien
ASSTSPVEISEWLDQK

SEQ ID NO: 1089 - protein, 16 aa, Homo Sapien
GLLPEELTPLILATQK

SEQ ID NO: 1090 - protein, 18 aa, Homo Sapien
GTSFDAAATSGGSASSEK

SEQ ID NO: 1091 - protein, 13 aa, Homo Sapien
LEVAPISDIIAIK

SEQ ID NO: 1092 - protein, 27 aa, Homo Sapien
TIVAINKDPEAPIFQVADYGIVADLFK

SEQ ID NO: 1093 - protein, 19 aa, Homo Sapien
AAVDAGFVPNDMQVGQTGK

SEQ ID NO: 1094 - protein, 23 aa, Homo Sapien
IVAPELYIAVGISGAIQHLAGMK

SEQ ID NO: 1095 - protein, 17 aa, Homo Sapien
EKAQELSDWIHQLESEK

SEQ ID NO: 1096 - protein, 21 aa, Homo Sapien
AQELSDWIHQLESEKFDLMAK

SEQ ID NO: 1097 - protein, 17 aa, Homo Sapien
SDWIHQLESEKFDLMAK

SEQ ID NO: 1098 - protein, 16 aa, Homo Sapien
KVLSNMGAHFGGYLVK

SEQ ID NO: 1099 - protein, 15 aa, Homo Sapien
AQELSDWIHQLESEK

SEQ ID NO: 1100 - protein, 10 aa, Homo Sapien
PVVPPLIPPK

SEQ ID NO: 1101 - protein, 15 aa, Homo Sapien
VLSNMGAHFGGYLVK

SEQ ID NO: 1102 - protein, 15 aa, Homo Sapien
FSAMHEFQNLHAQSK

SEQ ID NO: 1103 - protein, 10 aa, Homo Sapien
QLWDTANTVK

SEQ ID NO: 1104 - protein, 14 aa, Homo Sapien
TQVELLEAPTPALK

SEQ ID NO: 1105 - protein, 11 aa, Homo Sapien
MLDKEDFTMMK

SEQ ID NO: 1106 - protein, 16 aa, Homo Sapien
KLYESLLVGSLPDMNK

SEQ ID NO: 1107 - protein, 11 aa, Homo Sapien
KQLWDTANTVK

SEQ ID NO: 1108 - protein, 8 aa, Homo Sapien
ISDILDWK

SEQ ID NO: 1109 - protein, 8 aa, Homo Sapien
LSDLLDWK

SEQ ID NO: 1110 - protein, 15 aa, Homo Sapien
LYESLLVGSLPDMNK

SEQ ID NO: 1111 - protein, 10 aa, Homo Sapien
TNNFNVETLK

SEQ ID NO: 1112 - protein, 11 aa, Homo Sapien
VGGIYTVIQTK

SEQ ID NO: 1113 - protein, 11 aa, Homo Sapien
VGGIYTVLQTK

SEQ ID NO: 1114 - protein, 14 aa, Homo Sapien
KMFESFIESVPLLK

SEQ ID NO: 1115 - protein, 11 aa, Homo Sapien
AASAYAVGDVK

SEQ ID NO: 1116 - protein, 8 aa, Homo Sapien
IVDVIGEK

SEQ ID NO: 1117 - protein, 11 aa, Homo Sapien
NISHYEEQLVK

SEQ ID NO: 1118 - protein, 17 aa, Homo Sapien
KAVENINNTLGPALLQK

SEQ ID NO: 1119 - protein, 27 aa, Homo Sapien
KDATNVGDEGGFAPNILENNEALELLK

SEQ ID NO: 1120 - protein, 9 aa, Homo Sapien
KLSVVDQEK

SEQ ID NO: 1121 - protein, 16 aa, Homo Sapien
AVENINNTLGPALLQK

SEQ ID NO: 1122 - protein, 17 aa, Homo Sapien
AVENINNTLGPALLQKK

SEQ ID NO: 1123 - protein, 19 aa, Homo Sapien
EGGFAPNILENNEALELLK

SEQ ID NO: 1124 - protein, 11 aa, Homo Sapien
MILPVGASSFK

SEQ ID NO: 1125 - protein, 29 aa, Homo Sapien
YGKDATNVGDEGGFAPNILENNEALELLK

SEQ ID NO: 1126 - protein, 14 aa, Homo Sapien
VDKFMIELDGTENK

SEQ ID NO: 1127 - protein, 11 aa, Homo Sapien
LSVVDQEKVDK

SEQ ID NO: 1128 - protein, 10 aa, Homo Sapien
SVVDQEKVDK

SEQ ID NO: 1129 - protein, 8 aa, Homo Sapien
AEVYHHLK

SEQ ID NO: 1130 - protein, 26 aa, Homo Sapien
DATNVGDEGGFAPNILENNEALELLK

SEQ ID NO: 1131 - protein, 20 aa, Homo Sapien
DEGGFAPNILENNEALELLK

SEQ ID NO: 1132 - protein, 11 aa, Homo Sapien
FMIELDGTENK

SEQ ID NO: 1133 - protein, 9 aa, Homo Sapien
GAEVYHHLK

SEQ ID NO: 1134 - protein, 13 aa, Homo Sapien
GNPTVEVDLHTAK

SEQ ID NO: 1135 - protein, 30 aa, Homo Sapien
HIADLAGNPDLILPVPAFNVINGGSHAGNK

SEQ ID NO: 1136 - protein, 8 aa, Homo Sapien
IEEALGDK

SEQ ID NO: 1137 - protein, 10 aa, Homo Sapien
IGAEVYHHLK

SEQ ID NO: 1138 - protein, 12 aa, Homo Sapien
ILENNEALELLK

SEQ ID NO: 1139 - protein, 17 aa, Homo Sapien
LAMQEFMILPVGASSFK

SEQ ID NO: 1140 - protein, 8 aa, Homo Sapien
LSVVDQEK

SEQ ID NO: 1141 - protein, 11 aa, Homo Sapien
PTVEVDLHTAK

SEQ ID NO: 1142 - protein, 11 aa, Homo Sapien
TAIQAAGYPDK

SEQ ID NO: 1143 - protein, 13 aa, Homo Sapien
AQQEQELAADAFK

SEQ ID NO: 1144 - protein, 10 aa, Homo Sapien
LWEEQLAAAK

SEQ ID NO: 1145 - protein, 13 aa, Homo Sapien
LKEVLEYNAIGGK

SEQ ID NO: 1146 - protein, 13 aa, Homo Sapien
FLEPYNDSIQAQK

SEQ ID NO: 1147 - protein, 12 aa, Homo Sapien
VFDFTFSPEEMK

SEQ ID NO: 1148 - protein, 11 aa, Homo Sapien
YIVPMLTVDGK

SEQ ID NO: 1149 - protein, 20 aa, Homo Sapien
QKGADFLVTEVENGGSLGSK

SEQ ID NO: 1150 - protein, 22 aa, Homo Sapien
LAPITSDPTEATAVGAVEASFK

SEQ ID NO: 1151 - protein, 9 aa, Homo Sapien
VNFAMNVGK

SEQ ID NO: 1152 - protein, 23 aa, Homo Sapien
GVNLPGAAVDLPAVSEKDIQDLK

SEQ ID NO: 1153 - protein, 18 aa, Homo Sapien
KGVNLPGAAVDLPAVSEK

SEQ ID NO: 1154 - protein, 17 aa, Homo Sapien
AGKPVICATQMLESMIK

SEQ ID NO: 1155 - protein, 17 aa, Homo Sapien
GDLGIEIPAEKVFLAQK

SEQ ID NO: 1156 - protein, 17 aa, Homo Sapien
ADFLVTEVENGGSLGSK

SEQ ID NO: 1157 - protein, 18 aa, Homo Sapien
GADFLVTEVENGGSLGSK

SEQ ID NO: 1158 - protein, 19 aa, Homo Sapien
GADFLVTEVENGGSLGSKK

SEQ ID NO: 1159 - protein, 11 aa, Homo Sapien
GDLGIEIPAEK

SEQ ID NO: 1160 - protein, 10 aa, Homo Sapien
GSGTAEVELK

SEQ ID NO: 1161 - protein, 11 aa, Homo Sapien
GSGTAEVELKK

SEQ ID NO: 1162 - protein, 9 aa, Homo Sapien
GTAEVELKK

SEQ ID NO: 1163 - protein, 17 aa, Homo Sapien
GVNLPGAAVDLPAVSEK

SEQ ID NO: 1164 - protein, 10 aa, Homo Sapien
ITLDNAYMEK

SEQ ID NO: 1165 - protein, 13 aa, Homo Sapien
IYVDDGLISLQVK

SEQ ID NO: 1166 - protein, 16 aa, Homo Sapien
LNFSHGTHEYHAETIK

SEQ ID NO: 1167 - protein, 9 aa, Homo Sapien
PVAVALDTK

SEQ ID NO: 1168 - protein, 10 aa, Homo Sapien
SGTAEVELKK

SEQ ID NO: 1169 - protein, 8 aa, Homo Sapien
TAEVELKK

SEQ ID NO: 1170 - protein, 9 aa, Homo Sapien
KIGVVGWVK

SEQ ID NO: 1171 - protein, 18 aa, Homo Sapien
GTVTGQVQGPEDKVNSMK

SEQ ID NO: 1172 - protein, 15 aa, Homo Sapien
EAVEKEFEPLLNWMK

SEQ ID NO: 1173 - protein, 13 aa, Homo Sapien
EEASDYLELDTIK

SEQ ID NO: 1174 - protein, 11 aa, Homo Sapien
DISTNYYASQK

SEQ ID NO: 1175 - protein, 15 aa, Homo Sapien
YSQFINFPIYVWSSK

SEQ ID NO: 1176 - protein, 13 aa, Homo Sapien
TKAEPAVPQAPQK

SEQ ID NO: 1177 - protein, 14 aa, Homo Sapien
PAAKPAAAGAPPAK

SEQ ID NO: 1178 - protein, 11 aa, Homo Sapien
AEPAVPQAPQK

SEQ ID NO: 1179 - protein, 9 aa, Homo Sapien
HVLTTLGEK

SEQ ID NO: 1180 - protein, 10 aa, Homo Sapien
PAAAGAPPAK

SEQ ID NO: 1181 - protein, 10 aa, Homo Sapien
TQEPPVDLSK

SEQ ID NO: 1182 - protein, 9 aa, Homo Sapien
MATFEIDEK

SEQ ID NO: 1183 - protein, 12 aa, Homo Sapien
ESLDDLTNLVVK

SEQ ID NO: 1184 - protein, 19 aa, Homo Sapien
IISAASEGGANVFTVSYFK

SEQ ID NO: 1185 - protein, 13 aa, Homo Sapien
NNAYLAQSPQLYK

SEQ ID NO: 1186 - protein, 12 aa, Homo Sapien
LLNDEDPVVVTK

SEQ ID NO: 1187 - protein, 9 aa, Homo Sapien
QEGLESVLK

SEQ ID NO: 1188 - protein, 11 aa, Homo Sapien
VSVELTNSLFK

SEQ ID NO: 1189 - protein, 18 aa, Homo Sapien
EQWTKYEEENFYLEPYLK

SEQ ID NO: 1190 - protein, 13 aa, Homo Sapien
YEEENFYLEPYLK

SEQ ID NO: 1191 - protein, 10 aa, Homo Sapien
WYYNAAGFNK

SEQ ID NO: 1192 - protein, 12 aa, Homo Sapien
LVSSENFDDYMK

SEQ ID NO: 1193 - protein, 19 aa, Homo Sapien
LDYLDLYLIHWPTGFKPGK

SEQ ID NO: 1194 - protein, 22 aa, Homo Sapien
AIGISNFNHLQVEMILNKPGLK

SEQ ID NO: 1195 - protein, 8 aa, Homo Sapien
EELFIVSK

SEQ ID NO: 1196 - protein, 8 aa, Homo Sapien
LLLNNGAK

SEQ ID NO: 1197 - protein, 11 aa, Homo Sapien
SPPGQVTEAVK

SEQ ID NO: 1198 - protein, 21 aa, Homo Sapien
SFDIPPPPMDEKHPYYNSISK

SEQ ID NO: 1199 - protein, 27 aa, Homo Sapien
HLEGMSDQAIMELNLPTGIPIVYELNK

SEQ ID NO: 1200 - protein, 14 aa, Homo Sapien
SQGQDVTSSVYFMK

SEQ ID NO: 1201 - protein, 16 aa, Homo Sapien
WLPLEANPEVTNQFLK

SEQ ID NO: 1202 - protein, 13 aa, Homo Sapien
SLEEIYLFSLPIK

SEQ ID NO: 1203 - protein, 12 aa, Homo Sapien
SPYQEFTDHLVK

SEQ ID NO: 1204 - protein, 10 aa, Homo Sapien
AELIVQPELK

SEQ ID NO: 1205 - protein, 22 aa, Homo Sapien
AVTGYNDPETGNIISLFQAMNK

SEQ ID NO: 1206 - protein, 17 aa, Homo Sapien
GFFDPNTEENLTYLQLK

SEQ ID NO: 1207 - protein, 19 aa, Homo Sapien
GYFNEELSEILSDPSDDTK

SEQ ID NO: 1208 - protein, 10 aa, Homo Sapien
QLLQEQESVK

SEQ ID NO: 1209 - protein, 17 aa, Homo Sapien
SVQNDSQAIAEVLNQLK

SEQ ID NO: 1210 - protein, 11 aa, Homo Sapien
ALAAAGYDVEK

SEQ ID NO: 1211 - protein, 17 aa, Homo Sapien
AKDIVPGDIVEIAVGDK

SEQ ID NO: 1212 - protein, 13 aa, Homo Sapien
MNVFDTELKGLSK

SEQ ID NO: 1213 - protein, 16 aa, Homo Sapien
AMGVVVATGVNTEIGK

SEQ ID NO: 1214 - protein, 15 aa, Homo Sapien
DIVPGDIVEIAVGDK

SEQ ID NO: 1215 - protein, 13 aa, Homo Sapien
EEMHLEDSANFIK

SEQ ID NO: 1216 - protein, 8 aa, Homo Sapien
IEVASSVK

SEQ ID NO: 1217 - protein, 13 aa, Homo Sapien
IGIFGQDEDVTSK

SEQ ID NO: 1218 - protein, 13 aa, Homo Sapien
ISLPVILMDETLK

SEQ ID NO: 1219 - protein, 26 aa, Homo Sapien
IVEFLQSFDEITAMTGDGVNDAPALK

SEQ ID NO: 1220 - protein, 27 aa, Homo Sapien
IVEFLQSFDEITAMTGDGVNDAPALKK

SEQ ID NO: 1221 - protein, 9 aa, Homo Sapien
MNVFDTELK

SEQ ID NO: 1222 - protein, 23 aa, Homo Sapien
TVEEVLGHFGVNESTGLSLEQVK

SEQ ID NO: 1223 - protein, 24 aa, Homo Sapien
TVEEVLGHFGVNESTGLSLEQVKK

SEQ ID NO: 1224 - protein, 8 aa, Homo Sapien
VPMTSGVK

SEQ ID NO: 1225 - protein, 12 aa, Homo Sapien
WGSNELPAEEGK

SEQ ID NO: 1226 - protein, 12 aa, Homo Sapien
LQVNLLVKPSEK

SEQ ID NO: 1227 - protein, 12 aa, Homo Sapien
QVVLEEGTIAFK

SEQ ID NO: 1228 - protein, 8 aa, Homo Sapien
VAIIDTYK

SEQ ID NO: 1229 - protein, 15 aa, Homo Sapien
NDTKEDVFVHQTAIK

SEQ ID NO: 1230 - protein, 52 aa, Homo Sapien
SPVGSGAPQAAAPAPAAHVAGNPGGDAAPAATGTAAAASLATAAGSEDAEKK

SEQ ID NO: 1231 - protein, 13 aa, Homo Sapien
LALGDDSPALKEK

SEQ ID NO: 1232 - protein, 23 aa, Homo Sapien
VGNLTVVGKEPESILQVLSQMEK

SEQ ID NO: 1233 - protein, 19 aa, Homo Sapien
APPSVFAEVPQAQPVLVFK

SEQ ID NO: 1234 - protein, 14 aa, Homo Sapien
EPESILQVLSQMEK

SEQ ID NO: 1235 - protein, 9 aa, Homo Sapien
INVSGLTTK

SEQ ID NO: 1236 - protein, 20 aa, Homo Sapien
IVASTLSNPELFEEWTGNVK

SEQ ID NO: 1237 - protein, 11 aa, Homo Sapien
LALGDDSPALK

SEQ ID NO: 1238 - protein, 24 aa, Homo Sapien
NTPVYVSSPTWENHNAVFSAAGFK

SEQ ID NO: 1239 - protein, 18 aa, Homo Sapien
PPSVFAEVPQAQPVLVFK

SEQ ID NO: 1240 - protein, 17 aa, Homo Sapien
PSVFAEVPQAQPVLVFK

SEQ ID NO: 1241 - protein, 9 aa, Homo Sapien
QVEYLVNEK

SEQ ID NO: 1242 - protein, 23 aa, Homo Sapien
TPGTWNHITDQIGMFSFTGLNPK

SEQ ID NO: 1243 - protein, 15 aa, Homo Sapien
NLDYVATSIHEAVTK

SEQ ID NO: 1244 - protein, 9 aa, Homo Sapien
VGNLTVVGK

SEQ ID NO: 1245 - protein, 15 aa, Homo Sapien
GQDIKVPPPLPQFGK

SEQ ID NO: 1246 - protein, 10 aa, Homo Sapien
VPPPLPQFGK

SEQ ID NO: 1247 - protein, 11 aa, Homo Sapien
VPPPLPQFGKK

SEQ ID NO: 1248 - protein, 14 aa, Homo Sapien
EVENVAITALEGLK

SEQ ID NO: 1249 - protein, 24 aa, Homo Sapien
TVGMVAGDEESYEVFADLFDPVIK

SEQ ID NO: 1250 - protein, 12 aa, Homo Sapien
ILQAVNFPFLVK

SEQ ID NO: 1251 - protein, 9 aa, Homo Sapien
NLLQVDLTK

SEQ ID NO: 1252 - protein, 12 aa, Homo Sapien
SKVSDLTQAANK

SEQ ID NO: 1253 - protein, 9 aa, Homo Sapien
AQYETIAAK

SEQ ID NO: 1254 - protein, 13 aa, Homo Sapien
IESLNEEIAFLKK

SEQ ID NO: 1255 - protein, 8 aa, Homo Sapien
LQEEIQLK

SEQ ID NO: 1256 - protein, 12 aa, Homo Sapien
IESLNEEIAFLK

SEQ ID NO: 1257 - protein, 10 aa, Homo Sapien
NISEAEEWYK

SEQ ID NO: 1258 - protein, 10 aa, Homo Sapien
VSDLTQAANK

SEQ ID NO: 1259 - protein, 19 aa, Homo Sapien
TMLELLNQLDGFQPNTQVK

SEQ ID NO: 1260 - protein, 18 aa, Homo Sapien
EKAPSIIFIDELDAIGTK

SEQ ID NO: 1261 - protein, 11 aa, Homo Sapien
VTHELQAMKDK

SEQ ID NO: 1262 - protein, 16 aa, Homo Sapien
LAGPQLVQMFIGDGAK

SEQ ID NO: 1263 - protein, 15 aa, Homo Sapien
QTYFLPVIGLVDAEK

SEQ ID NO: 1264 - protein, 11 aa, Homo Sapien
QAGVFEPTIVK

SEQ ID NO: 1265 - protein, 10 aa, Homo Sapien
SSLGPVGLDK

SEQ ID NO: 1266 - protein, 10 aa, Homo Sapien
YPVNSVNILK

SEQ ID NO: 1267 - protein, 15 aa, Homo Sapien
SQNVMAAASIANIVK

SEQ ID NO: 1268 - protein, 14 aa, Homo Sapien
ALASQLQDSLKDLK

SEQ ID NO: 1269 - protein, 9 aa, Homo Sapien
GNDIIAAAK

SEQ ID NO: 1270 - protein, 11 aa, Homo Sapien
GQGSSPVAMQK

SEQ ID NO: 1271 - protein, 15 aa, Homo Sapien
NPGNQAAYEHFETMK

SEQ ID NO: 1272 - protein, 11 aa, Homo Sapien
STVEGIQASVK

SEQ ID NO: 1273 - protein, 11 aa, Homo Sapien
ALASQLQDSLK

SEQ ID NO: 1274 - protein, 14 aa, Homo Sapien
AQQVSQGLDVLTAK

SEQ ID NO: 1275 - protein, 13 aa, Homo Sapien
AVAGNISDPGLQK

SEQ ID NO: 1276 - protein, 12 aa, Homo Sapien
ETVQTTEDQILK

SEQ ID NO: 1277 - protein, 9 aa, Homo Sapien
IPTISTQLK

SEQ ID NO: 1278 - protein, 9 aa, Homo Sapien
NQGIEEALK

SEQ ID NO: 1279 - protein, 8 aa, Homo Sapien
QILDEAGK

SEQ ID NO: 1280 - protein, 12 aa, Homo Sapien
QVATALQNLQTK

SEQ ID NO: 1281 - protein, 12 aa, Homo Sapien
SLLDASEEAIKK

SEQ ID NO: 1282 - protein, 10 aa, Homo Sapien
TISPMVMDAK

SEQ ID NO: 1283 - protein, 15 aa, Homo Sapien
VLQLTSWDEDAWASK

SEQ ID NO: 1284 - protein, 11 aa, Homo Sapien
VMLVNSMNTVK

SEQ ID NO: 1285 - protein, 18 aa, Homo Sapien
FSGWYDADLSPAGHEEAK

SEQ ID NO: 1286 - protein, 21 aa, Homo Sapien
SYDVPPPPMEPDHPFYSNISK

SEQ ID NO: 1287 - protein, 12 aa, Homo Sapien
SKAEAEALYQTK

SEQ ID NO: 1288 - protein, 9 aa, Homo Sapien
VQFLEQQNK

SEQ ID NO: 1289 - protein, 14 aa, Homo Sapien
WNLLQQQTTTTSSK

SEQ ID NO: 1290 - protein, 10 aa, Homo Sapien
SISLYYTGEK

SEQ ID NO: 1291 - protein, 14 aa, Homo Sapien
FGYVDFESAEDLEK

SEQ ID NO: 1292 - protein, 14 aa, Homo Sapien
GFGFVDFNSEEDAK

SEQ ID NO: 1293 - protein, 11 aa, Homo Sapien
ASGVEGADVVK

SEQ ID NO: 1294 - protein, 9 aa, Homo Sapien
DFNPTATVK

SEQ ID NO: 1295 - protein, 10 aa, Homo Sapien
FLLSESGSGK

SEQ ID NO: 1296 - protein, 11 aa, Homo Sapien
FNTSDVSAIEK

SEQ ID NO: 1297 - protein, 10 aa, Homo Sapien
DIEEIIDELK

SEQ ID NO: 1298 - protein, 11 aa, Homo Sapien
NSDSILEAIQK

SEQ ID NO: 1299 - protein, 11 aa, Homo Sapien
EFSGYVESGLK

SEQ ID NO: 1300 - protein, 9 aa, Homo Sapien
SEIDLVQIK

SEQ ID NO: 1301 - protein, 9 aa, Homo Sapien
KFFQMVGLK

SEQ ID NO: 1302 - protein, 15 aa, Homo Sapien
GINTLVTYDMVPEPK

SEQ ID NO: 1303 - protein, 8 aa, Homo Sapien
ILEVVKDK

SEQ ID NO: 1304 - protein, 18 aa, Homo Sapien
LDFTGNLIEDIEDGTFSK

SEQ ID NO: 1305 - protein, 16 aa, Homo Sapien
LSLLEELSLAENQLLK

SEQ ID NO: 1306 - protein, 14 aa, Homo Sapien
ELGVDQESEEGKGK

SEQ ID NO: 1307 - protein, 18 aa, Homo Sapien
GHAYSVTGLDEVPFKGEK

SEQ ID NO: 1308 - protein, 9 aa, Homo Sapien
DFFLYNASK

SEQ ID NO: 1309 - protein, 8 aa, Homo Sapien
FPIQFVWK

SEQ ID NO: 1310 - protein, 12 aa, Homo Sapien
KAQDVVSNVNYK

SEQ ID NO: 1311 - protein, 18 aa, Homo Sapien
VTDQISDIVYKDDLNWLK

SEQ ID NO: 1312 - protein, 9 aa, Homo Sapien
VKDEVSDLK

SEQ ID NO: 1313 - protein, 20 aa, Homo Sapien
NVNQIQSDNVYKDEYNSFLK

SEQ ID NO: 1314 - protein, 7 aa, Homo Sapien
YKDLYVK

SEQ ID NO: 1315 - protein, 8 aa, Homo Sapien
KDYEESIK

SEQ ID NO: 1316 - protein, 9 aa, Homo Sapien
YKEDLQVLK

SEQ ID NO: 1317 - protein, 20 aa, Homo Sapien
NMMQIQSDNVYKEDYNNWMK

SEQ ID NO: 1318 - protein, 16 aa, Homo Sapien
NQENFSSVLYKENMGK

SEQ ID NO: 1319 - protein, 17 aa, Homo Sapien
HNQENISSVLYKENVGK

SEQ ID NO: 1320 - protein, 8 aa, Homo Sapien
LYKENYEK

SEQ ID NO: 1321 - protein, 15 aa, Homo Sapien
KFSSPVDMLGVVLAK

SEQ ID NO: 1322 - protein, 16 aa, Homo Sapien
TKFSSPVDMLSILLAK

SEQ ID NO: 1323 - protein, 20 aa, Homo Sapien
TKFTAVTDSPVLLQAQLNTK

SEQ ID NO: 1324 - protein, 16 aa, Homo Sapien
LKFTSVTDSLEQVLAK

SEQ ID NO: 1325 - protein, 16 aa, Homo Sapien
LKFTYAMDTMEQALNK

SEQ ID NO: 1326 - protein, 16 aa, Homo Sapien
QKGHHIGAQSIEDDPK

SEQ ID NO: 1327 - protein, 18 aa, Homo Sapien
SKGHYHTIPDNLEQLHLK

SEQ ID NO: 1328 - protein, 17 aa, Homo Sapien
DAQANITNTNYKHLIHK

SEQ ID NO: 1329 - protein, 14 aa, Homo Sapien
VKHNQENISSVLYK

SEQ ID NO: 1330 - protein, 14 aa, Homo Sapien
FKLDTVLQNFSSDK

SEQ ID NO: 1331 - protein, 11 aa, Homo Sapien
KLWSNYLYTDK

SEQ ID NO: 1332 - protein, 12 aa, Homo Sapien
AAGDALSDKLYK

SEQ ID NO: 1333 - protein, 9 aa, Homo Sapien
INYSDKLYK

SEQ ID NO: 1334 - protein, 16 aa, Homo Sapien
GIGWLPLGSLEAEKNK

SEQ ID NO: 1335 - protein, 16 aa, Homo Sapien
GIGWMTSGSLEDEKNK

SEQ ID NO: 1336 - protein, 26 aa, Homo Sapien
TSDYEQSETSKPALAQPALAQPASAK

SEQ ID NO: 1337 - protein, 16 aa, Homo Sapien
IQSDNEYKQDYNEWYK

SEQ ID NO: 1338 - protein, 14 aa, Homo Sapien
GKQVGFLSLQDDPK

SEQ ID NO: 1339 - protein, 40 aa, Homo Sapien
SASALSISGGEEKSEHSEAPDHHLSTYSDGGVFAVSTAYK

SEQ ID NO: 1340 - protein, 16 aa, Homo Sapien
KSYDLQSQLQYTAAGK

SEQ ID NO: 1341 - protein, 27 aa, Homo Sapien
HLYTEAWDADKTSIHVMPDTPDILLAK

SEQ ID NO: 1342 - protein, 12 aa, Homo Sapien
KVYELQSENLYK

SEQ ID NO: 1343 - protein, 9 aa, Homo Sapien
DVISDYKYK

SEQ ID NO: 1344 - protein, 11 aa, Homo Sapien
MQDLFSPNKYK

SEQ ID NO: 1345 - protein, 11 aa, Homo Sapien
NTLIESDLKYK

SEQ ID NO: 1346 - protein, 16 aa, Homo Sapien
TKYHTPLDMVSVTAAK

SEQ ID NO: 1347 - protein, 17 aa, Homo Sapien
DKYLLPPDAPELVQAVK

SEQ ID NO: 1348 - protein, 16 aa, Homo Sapien
SKYNTPHDMFNVVAAK

SEQ ID NO: 1349 - protein, 16 aa, Homo Sapien
GKYTFSPDTPHISHSK

SEQ ID NO: 1350 - protein, 16 aa, Homo Sapien
HKYTIDPELPQFIQAK

SEQ ID NO: 1351 - protein, 9 aa, Homo Sapien
ALSDVAYKK

SEQ ID NO: 1352 - protein, 16 aa, Homo Sapien
AMYDYMAADADEVSFK

SEQ ID NO: 1353 - protein, 8 aa, Homo Sapien
ASDILNEK

SEQ ID NO: 1354 - protein, 17 aa, Homo Sapien
ATSYILPSSTLSLTHAK

SEQ ID NO: 1355 - protein, 10 aa, Homo Sapien
AVTDTVSDVK

SEQ ID NO: 1356 - protein, 11 aa, Homo Sapien
AYDLQSDNIYK

SEQ ID NO: 1357 - protein, 11 aa, Homo Sapien
AYDLQSDNLYK

SEQ ID NO: 1358 - protein, 11 aa, Homo Sapien
AYELQSDNVYK

SEQ ID NO: 1359 - protein, 9 aa, Homo Sapien
AYGYTLGPK

SEQ ID NO: 1360 - protein, 7 aa, Homo Sapien
DIASDYK

SEQ ID NO: 1361 - protein, 8 aa, Homo Sapien
DWYDLIAK

SEQ ID NO: 1362 - protein, 21 aa, Homo Sapien
ESLIMNHVLNTSQLASSYQYK

SEQ ID NO: 1363 - protein, 22 aa, Homo Sapien
ESLIMNHVLNTSQLASSYQYKK

SEQ ID NO: 1364 - protein, 11 aa, Homo Sapien
FMTPYIAHSQK

SEQ ID NO: 1365 - protein, 14 aa, Homo Sapien
FSSLMDSIPMVLAK

SEQ ID NO: 1366 - protein, 14 aa, Homo Sapien
FSSPVDMLSILLAK

SEQ ID NO: 1367 - protein, 18 aa, Homo Sapien
FTAVTDSPVLLQAQLNTK

SEQ ID NO: 1368 - protein, 18 aa, Homo Sapien
FTQVTDSPVLLQAQVNSK

SEQ ID NO: 1369 - protein, 14 aa, Homo Sapien
FTSITDTPEQVLAK

SEQ ID NO: 1370 - protein, 18 aa, Homo Sapien
FTSVPDSMGMVLAQHNTK

SEQ ID NO: 1371 - protein, 14 aa, Homo Sapien
FTYAMDTMEQALNK

SEQ ID NO: 1372 - protein, 14 aa, Homo Sapien
GHHIGAQSIEDDPK

SEQ ID NO: 1373 - protein, 16 aa, Homo Sapien
GHYHTIPDNLEQLHLK

SEQ ID NO: 1374 - protein, 14 aa, Homo Sapien
GIGWIPIGSLDVEK

SEQ ID NO: 1375 - protein, 14 aa, Homo Sapien
GIGWVPIESLEVEK

SEQ ID NO: 1376 - protein, 14 aa, Homo Sapien
GIGWVPIGSMDVVK

SEQ ID NO: 1377 - protein, 22 aa, Homo Sapien
GLAEQQAQFTPLADPPDIEFAK

SEQ ID NO: 1378 - protein, 23 aa, Homo Sapien
GLAEQQAQFTPLADPPDIEFAKK

SEQ ID NO: 1379 - protein, 15 aa, Homo Sapien
GNNVLGDAIPITAAK

SEQ ID NO: 1380 - protein, 19 aa, Homo Sapien
HILHSYSYPPDSINVDLAK

SEQ ID NO: 1381 - protein, 9 aa, Homo Sapien
HLYTIDWNK

SEQ ID NO: 1382 - protein, 12 aa, Homo Sapien
HNQENISSVLYK

SEQ ID NO: 1383 - protein, 14 aa, Homo Sapien
IHIVPDMVEMVTAK

SEQ ID NO: 1384 - protein, 8 aa, Homo Sapien
IMNEHLYK

SEQ ID NO: 1385 - protein, 9 aa, Homo Sapien
IMWSLHIAK

SEQ ID NO: 1386 - protein, 14 aa, Homo Sapien
INIPADMVSVLAAK

SEQ ID NO: 1387 - protein, 9 aa, Homo Sapien
INYSETLYK

SEQ ID NO: 1388 - protein, 14 aa, Homo Sapien
IQSPVDMLSILHSK

SEQ ID NO: 1389 - protein, 12 aa, Homo Sapien
LDTVLQNFSSDK

SEQ ID NO: 1390 - protein, 13 aa, Homo Sapien
LDTVLQNFSSDKK

SEQ ID NO: 1391 - protein, 8 aa, Homo Sapien
LGWEEALK

SEQ ID NO: 1392 - protein, 9 aa, Homo Sapien
LPGDTPHFK

SEQ ID NO: 1393 - protein, 8 aa, Homo Sapien
LSDVAYKK

SEQ ID NO: 1394 - protein, 10 aa, Homo Sapien
LWSNYLYTDK

SEQ ID NO: 1395 - protein, 8 aa, Homo Sapien
LYTEAWDK

SEQ ID NO: 1396 - protein, 12 aa, Homo Sapien
MIGVLSINDDPK

SEQ ID NO: 1397 - protein, 9 aa, Homo Sapien
MQDLFSPNK

SEQ ID NO: 1398 - protein, 15 aa, Homo Sapien
NLTGLEVTPALLHVK

SEQ ID NO: 1399 - protein, 9 aa, Homo Sapien
NLYSSNLYK

SEQ ID NO: 1400 - protein, 12 aa, Homo Sapien
NMMQIQSDNVYK

SEQ ID NO: 1401 - protein, 8 aa, Homo Sapien
NNALNMNK

SEQ ID NO: 1402 - protein, 8 aa, Homo Sapien
NNALTMSK

SEQ ID NO: 1403 - protein, 9 aa, Homo Sapien
NQEMMSQIK

SEQ ID NO: 1404 - protein, 9 aa, Homo Sapien
NTLIESDLK

SEQ ID NO: 1405 - protein, 8 aa, Homo Sapien
NTSDVMYK

SEQ ID NO: 1406 - protein, 10 aa, Homo Sapien
PDTPHISHSK

SEQ ID NO: 1407 - protein, 12 aa, Homo Sapien
QAYDLQSDNIYK

SEQ ID NO: 1408 - protein, 12 aa, Homo Sapien
QAYDLQSDNLYK

SEQ ID NO: 1409 - protein, 10 aa, Homo Sapien
QENISSVLYK

SEQ ID NO: 1410 - protein, 9 aa, Homo Sapien
QHPSNFQFK

SEQ ID NO: 1411 - protein, 10 aa, Homo Sapien
QHPSNFQFKK

SEQ ID NO: 1412 - protein, 12 aa, Homo Sapien
QVGFLSLQDDPK

SEQ ID NO: 1413 - protein, 7 aa, Homo Sapien
SDVAYKK

SEQ ID NO: 1414 - protein, 27 aa, Homo Sapien
SEHSEAPDHHLSTYSDGGVFAVSTAYK

SEQ ID NO: 1415 - protein, 13 aa, Homo Sapien
SNYSIMLEPPEVK

SEQ ID NO: 1416 - protein, 12 aa, Homo Sapien
SPVDMLGVVLAK

SEQ ID NO: 1417 - protein, 23 aa, Homo Sapien
SSSVATQQTTVSSIPSHPSTAGK

SEQ ID NO: 1418 - protein, 15 aa, Homo Sapien
SYDLQSQLQYTAAGK

SEQ ID NO: 1419 - protein, 13 aa, Homo Sapien
TGLEVTPALLHVK

SEQ ID NO: 1420 - protein, 16 aa, Homo Sapien
TQIHIMPDTPDIVLAK

SEQ ID NO: 1421 - protein, 16 aa, Homo Sapien
TSFHTPVDMLSVVAAK

SEQ ID NO: 1422 - protein, 16 aa, Homo Sapien
TSIHVMPDTPDILLAK

SEQ ID NO: 1423 - protein, 13 aa, Homo Sapien
TSIVDTPEVVLAK

SEQ ID NO: 1424 - protein, 16 aa, Homo Sapien
TSYHTPGDMVSITAAK

SEQ ID NO: 1425 - protein, 14 aa, Homo Sapien
VHIMPDIPQIILAK

SEQ ID NO: 1426 - protein, 12 aa, Homo Sapien
VNAYNLSDNLYK

SEQ ID NO: 1427 - protein, 7 aa, Homo Sapien
WALIADK

SEQ ID NO: 1428 - protein, 14 aa, Homo Sapien
YHTPLDMVSVTAAK

SEQ ID NO: 1429 - protein, 14 aa, Homo Sapien
YNLPPDLPQFIQAK

SEQ ID NO: 1430 - protein, 14 aa, Homo Sapien
YNTPHDMFNVVAAK

SEQ ID NO: 1431 - protein, 14 aa, Homo Sapien
YTFSPDTPHISHSK

SEQ ID NO: 1432 - protein, 14 aa, Homo Sapien
YTIDPELPQFIQAK

SEQ ID NO: 1433 - protein, 14 aa, Homo Sapien
YTMSPDLPQFLQAK

SEQ ID NO: 1434 - protein, 20 aa, Homo Sapien
NMMQIQSDNQYKADYADFMK

SEQ ID NO: 1435 - protein, 12 aa, Homo Sapien
KAYALQSDVEYK

SEQ ID NO: 1436 - protein, 12 aa, Homo Sapien
KAYDLQSDAIYK

SEQ ID NO: 1437 - protein, 12 aa, Homo Sapien
KAYDLQSDALYK

SEQ ID NO: 1438 - protein, 12 aa, Homo Sapien
KAYDLQSDNLYK

SEQ ID NO: 1439 - protein, 12 aa, Homo Sapien
KAYELQSDNVYK

SEQ ID NO: 1440 - protein, 11 aa, Homo Sapien
HLYTIDWNKDK

SEQ ID NO: 1441 - protein, 10 aa, Homo Sapien
LYTEAWDKDK

SEQ ID NO: 1442 - protein, 19 aa, Homo Sapien
NAQEILSDNVYKDDLNWLK

SEQ ID NO: 1443 - protein, 8 aa, Homo Sapien
ADLKDLSK

SEQ ID NO: 1444 - protein, 9 aa, Homo Sapien
DVKDMVSEK

SEQ ID NO: 1445 - protein, 7 aa, Homo Sapien
YKDSYLK

SEQ ID NO: 1446 - protein, 18 aa, Homo Sapien
YKEAIGQGTPIPDLPEVK

SEQ ID NO: 1447 - protein, 9 aa, Homo Sapien
YKEDLTWLK

SEQ ID NO: 1448 - protein, 19 aa, Homo Sapien
NFSSVLYKEDVSPGTAIGK

SEQ ID NO: 1449 - protein, 9 aa, Homo Sapien
YKENYHQIK

SEQ ID NO: 1450 - protein, 12 aa, Homo Sapien
NATQILNEKEYK

SEQ ID NO: 1451 - protein, 16 aa, Homo Sapien
TKFSSPVDMLGVVLAK

SEQ ID NO: 1452 - protein, 21 aa, Homo Sapien
QHPDTLKFTSIEDAPITVQSK

SEQ ID NO: 1453 - protein, 16 aa, Homo Sapien
NKFTSIPDAMDIVLAK

SEQ ID NO: 1454 - protein, 16 aa, Homo Sapien
FKFTSVTDSLEQVLAK

SEQ ID NO: 1455 - protein, 13 aa, Homo Sapien
KGYDLPVDAIPIK

SEQ ID NO: 1456 - protein, 16 aa, Homo Sapien
KGYDLPVDAISVQLAK

SEQ ID NO: 1457 - protein, 13 aa, Homo Sapien
QISDILYKLEYNK

SEQ ID NO: 1458 - protein, 12 aa, Homo Sapien
KLTDSMDMVLAK

SEQ ID NO: 1459 - protein, 16 aa, Homo Sapien
SLEDDPKLVHFMQVAK

SEQ ID NO: 1460 - protein, 16 aa, Homo Sapien
SLEDDPKLVHSMQVAK

SEQ ID NO: 1461 - protein, 21 aa, Homo Sapien
MVGFQSLQDDPKLVHYMNVAK

SEQ ID NO: 1462 - protein, 16 aa, Homo Sapien
SLQDDPKLVHYMNVAK

SEQ ID NO: 1463 - protein, 12 aa, Homo Sapien
ANAINMSDKLYK

SEQ ID NO: 1464 - protein, 12 aa, Homo Sapien
VNQITMSDKLYK

SEQ ID NO: 1465 - protein, 12 aa, Homo Sapien
DMGKLYSTILYK

SEQ ID NO: 1466 - protein, 11 aa, Homo Sapien
KLYTEDWEADK

SEQ ID NO: 1467 - protein, 16 aa, Homo Sapien
NIEDDPKMMWSMHVAK

SEQ ID NO: 1468 - protein, 16 aa, Homo Sapien
GKPMLDFETPTYITAK

SEQ ID NO: 1469 - protein, 17 aa, Homo Sapien
VNAYNLSDNVYKQDWEK

SEQ ID NO: 1470 - protein, 16 aa, Homo Sapien
TQEAVSELIYKSDFFK

SEQ ID NO: 1471 - protein, 12 aa, Homo Sapien
KSQAIASDVDYK

SEQ ID NO: 1472 - protein, 12 aa, Homo Sapien
KTQEAVSELIYK

SEQ ID NO: 1473 - protein, 18 aa, Homo Sapien
DKTTVHIMPDTPEVLLAK

SEQ ID NO: 1474 - protein, 14 aa, Homo Sapien
FDIKVDAIPLLAAK

SEQ ID NO: 1475 - protein, 13 aa, Homo Sapien
QLSDLNYKVEGEK

SEQ ID NO: 1476 - protein, 18 aa, Homo Sapien
QFIQAKVNAYNISENMYK

SEQ ID NO: 1477 - protein, 10 aa, Homo Sapien
KVQDQLSEVK

SEQ ID NO: 1478 - protein, 9 aa, Homo Sapien
EIASDYKYK

SEQ ID NO: 1479 - protein, 9 aa, Homo Sapien
EIASEYKYK

SEQ ID NO: 1480 - protein, 12 aa, Homo Sapien
HADLVNSELKYK

SEQ ID NO: 1481 - protein, 12 aa, Homo Sapien
NATDIASQIKYK

SEQ ID NO: 1482 - protein, 9 aa, Homo Sapien
NIASDYKYK

SEQ ID NO: 1483 - protein, 12 aa, Homo Sapien
TVSNLVSENKYK

SEQ ID NO: 1484 - protein, 16 aa, Homo Sapien
LKYTSIVDTPEVVLAK

SEQ ID NO: 1485 - protein, 8 aa, Homo Sapien
ADYADFMK

SEQ ID NO: 1486 - protein, 8 aa, Homo Sapien
AMEIISEK

SEQ ID NO: 1487 - protein, 9 aa, Homo Sapien
AMEIISEKK

SEQ ID NO: 1488 - protein, 9 aa, Homo Sapien
ANAINMSDK

SEQ ID NO: 1489 - protein, 9 aa, Homo Sapien
ANALNVSNK

SEQ ID NO: 1490 - protein, 19 aa, Homo Sapien
ANFTSVVDTPEIIHAQQVK

SEQ ID NO: 1491 - protein, 9 aa, Homo Sapien
ANLINTSDK

SEQ ID NO: 1492 - protein, 16 aa, Homo Sapien
ANVHIPNDMMNHVLAK

SEQ ID NO: 1493 - protein, 8 aa, Homo Sapien
ASEIISEK

SEQ ID NO: 1494 - protein, 8 aa, Homo Sapien
ATEILSDK

SEQ ID NO: 1495 - protein, 11 aa, Homo Sapien
AYALQSDVEYK

SEQ ID NO: 1496 - protein, 10 aa, Homo Sapien
DANNLASEVK

SEQ ID NO: 1497 - protein, 12 aa, Homo Sapien
DAQANITNTNYK

SEQ ID NO: 1498 - protein, 16 aa, Homo Sapien
EAIGQGTPIPDLPEVK

SEQ ID NO: 1499 - protein, 10 aa, Homo Sapien
EATELQSIVK

SEQ ID NO: 1500 - protein, 11 aa, Homo Sapien
EDVSPGTAIGK

SEQ ID NO: 1501 - protein, 29 aa, Homo Sapien
ENLQNYNLVTDTPLYVTAVQSGINASEVK

SEQ ID NO: 1502 - protein, 14 aa, Homo Sapien
FSSPVDMLGVVLAK

SEQ ID NO: 1503 - protein, 14 aa, Homo Sapien
FTSIEDAPITVQSK

SEQ ID NO: 1504 - protein, 14 aa, Homo Sapien
FTSIPDAMDIVLAK

SEQ ID NO: 1505 - protein, 14 aa, Homo Sapien
FTSIVDSPVMVQAK

SEQ ID NO: 1506 - protein, 14 aa, Homo Sapien
FTSVTDSLEQVLAK

SEQ ID NO: 1507 - protein, 15 aa, Homo Sapien
GFFPQTITQEYEAIK

SEQ ID NO: 1508 - protein, 16 aa, Homo Sapien
GFFPQTITQEYEAIKK

SEQ ID NO: 1509 - protein, 14 aa, Homo Sapien
GIGWIPIGSLEVEK

SEQ ID NO: 1510 - protein, 14 aa, Homo Sapien
GIGWLPLGSLEAEK

SEQ ID NO: 1511 - protein, 16 aa, Homo Sapien
GIGWMPNDSVSVNHAK

SEQ ID NO: 1512 - protein, 14 aa, Homo Sapien
GIGWSPLGSLEAEK

SEQ ID NO: 1513 - protein, 14 aa, Homo Sapien
GIGWVPIGSVEVEK

SEQ ID NO: 1514 - protein, 14 aa, Homo Sapien
GLGWSPAGSLEVEK

SEQ ID NO: 1515 - protein, 12 aa, Homo Sapien
GYDLPVDAIPIK

SEQ ID NO: 1516 - protein, 15 aa, Homo Sapien
GYDLPVDAISVQLAK

SEQ ID NO: 1517 - protein, 9 aa, Homo Sapien
HAADIFSEK

SEQ ID NO: 1518 - protein, 10 aa, Homo Sapien
HAADIFSEKK

SEQ ID NO: 1519 - protein, 10 aa, Homo Sapien
HADLVNSELK

SEQ ID NO: 1520 - protein, 8 aa, Homo Sapien
HISSVMYK

SEQ ID NO: 1521 - protein, 11 aa, Homo Sapien
HLYTEAWDADK

SEQ ID NO: 1522 - protein, 19 aa, Homo Sapien
HSLHHYTYLPDAMDLELSK

SEQ ID NO: 1523 - protein, 14 aa, Homo Sapien
IHVMPDTPDILQAK

SEQ ID NO: 1524 - protein, 8 aa, Homo Sapien
ILDQYLYK

SEQ ID NO: 1525 - protein, 10 aa, Homo Sapien
INSVNQSDVK

SEQ ID NO: 1526 - protein, 10 aa, Homo Sapien
LDAIPIQAAK

SEQ ID NO: 1527 - protein, 9 aa, Homo Sapien
LGWEEALKK

SEQ ID NO: 1528 - protein, 13 aa, Homo Sapien
LQSQYLYVELATK

SEQ ID NO: 1529 - protein, 11 aa, Homo Sapien
LTDSMDMVLAK

SEQ ID NO: 1530 - protein, 9 aa, Homo Sapien
LVHSMQVAK

SEQ ID NO: 1531 - protein, 9 aa, Homo Sapien
LVHYMNVAK

SEQ ID NO: 1532 - protein, 13 aa, Homo Sapien
LVTDTPVYVQAVK

SEQ ID NO: 1533 - protein, 8 aa, Homo Sapien
LYSTILYK

SEQ ID NO: 1534 - protein, 11 aa, Homo Sapien
LYTEAWDNDKK

SEQ ID NO: 1535 - protein, 10 aa, Homo Sapien
LYTEDWEADK

SEQ ID NO: 1536 - protein, 12 aa, Homo Sapien
MAQDVATNVNYK

SEQ ID NO: 1537 - protein, 12 aa, Homo Sapien
MIGALSINDDPK

SEQ ID NO: 1538 - protein, 12 aa, Homo Sapien
MVGFQSLQDDPK

SEQ ID NO: 1539 - protein, 12 aa, Homo Sapien
NAMQIQSDNLYK

SEQ ID NO: 1540 - protein, 12 aa, Homo Sapien
NAQEILSDNVYK

SEQ ID NO: 1541 - protein, 10 aa, Homo Sapien
NATDIASQIK

SEQ ID NO: 1542 - protein, 9 aa, Homo Sapien
NATQILNEK

SEQ ID NO: 1543 - protein, 7 aa, Homo Sapien
NIASDYK

SEQ ID NO: 1544 - protein, 12 aa, Homo Sapien
NMMQIQSDNQYK

SEQ ID NO: 1545 - protein, 11 aa, Homo Sapien
NQENFSSVLYK

SEQ ID NO: 1546 - protein, 11 aa, Homo Sapien
NQENISSVLYK

SEQ ID NO: 1547 - protein, 7 aa, Homo Sapien
NTAMFSK

SEQ ID NO: 1548 - protein, 12 aa, Homo Sapien
QAYDLQSDNMYK

SEQ ID NO: 1549 - protein, 8 aa, Homo Sapien
QLSDLNYK

SEQ ID NO: 1550 - protein, 9 aa, Homo Sapien
QNQTLYSQK

SEQ ID NO: 1551 - protein, 13 aa, Homo Sapien
SASALSISGGEEK

SEQ ID NO: 1552 - protein, 10 aa, Homo Sapien
SDAIPIVAAK

SEQ ID NO: 1553 - protein, 10 aa, Homo Sapien
SNAENISIPK

SEQ ID NO: 1554 - protein, 11 aa, Homo Sapien
SQAIASDVDYK

SEQ ID NO: 1555 - protein, 11 aa, Homo Sapien
SSLQQSDFEYK

SEQ ID NO: 1556 - protein, 15 aa, Homo Sapien
TIHVMPDTPEIMLAK

SEQ ID NO: 1557 - protein, 16 aa, Homo Sapien
TIYTAPLDMLQVTQAK

SEQ ID NO: 1558 - protein, 17 aa, Homo Sapien
TIYTAPLDMLQVTQAKK

SEQ ID NO: 1559 - protein, 11 aa, Homo Sapien
TQEAVSELIYK

SEQ ID NO: 1560 - protein, 16 aa, Homo Sapien
TSYHTPADMLSVTAAK

SEQ ID NO: 1561 - protein, 16 aa, Homo Sapien
TTVHIMPDTPEVLLAK

SEQ ID NO: 1562 - protein, 10 aa, Homo Sapien
TVSNLVSENK

SEQ ID NO: 1563 - protein, 10 aa, Homo Sapien
VDAIPLLAAK

SEQ ID NO: 1564 - protein, 8 aa, Homo Sapien
VHYMNVAK

SEQ ID NO: 1565 - protein, 12 aa, Homo Sapien
VNALNMSDAHYK

SEQ ID NO: 1566 - protein, 12 aa, Homo Sapien
VNAYNISENMYK

SEQ ID NO: 1567 - protein, 12 aa, Homo Sapien
VNAYNLSDNVYK

SEQ ID NO: 1568 - protein, 9 aa, Homo Sapien
VNQITMSDK

SEQ ID NO: 1569 - protein, 8 aa, Homo Sapien
VNTNLDYK

SEQ ID NO: 1570 - protein, 9 aa, Homo Sapien
VNTNLDYKK

SEQ ID NO: 1571 - protein, 9 aa, Homo Sapien
VQDQLSEVK

SEQ ID NO: 1572 - protein, 7 aa, Homo Sapien
YHEDFEK

SEQ ID NO: 1573 - protein, 15 aa, Homo Sapien
YLLPPDAPELVQAVK

SEQ ID NO: 1574 - protein, 14 aa, Homo Sapien
YSSPVDMLGIVLAK

SEQ ID NO: 1575 - protein, 18 aa, Homo Sapien
YSTLMDSMNMVLAQNNAK

SEQ ID NO: 1576 - protein, 14 aa, Homo Sapien
YTSIVDTPEVVLAK

SEQ ID NO: 1577 - protein, 10 aa, Homo Sapien
YVGDITSDIK

SEQ ID NO: 1578 - protein, 14 aa, Homo Sapien
LKPQYLEELPGQLK

SEQ ID NO: 1579 - protein, 8 aa, Homo Sapien
FSWFAGEK

SEQ ID NO: 1580 - protein, 16 aa, Homo Sapien
TGVELGKPTHFTVNAK

SEQ ID NO: 1581 - protein, 16 aa, Homo Sapien
SPFEVYVDKSQGDASK

SEQ ID NO: 1582 - protein, 17 aa, Homo Sapien
VTAQGPGLEPSGNIANK

SEQ ID NO: 1583 - protein, 16 aa, Homo Sapien
TGVAVNKPAEFTVDAK

SEQ ID NO: 1584 - protein, 13 aa, Homo Sapien
IDFEKEPLGVNAK

SEQ ID NO: 1585 - protein, 14 aa, Homo Sapien
YTIIIPENLKPQMK

SEQ ID NO: 1586 - protein, 16 aa, Homo Sapien
KQDIENILHWNVTQHK

SEQ ID NO: 1587 - protein, 13 aa, Homo Sapien
GFQVAPEHHNDHK

SEQ ID NO: 1588 - protein, 8 aa, Homo Sapien
GPFLLGIK

SEQ ID NO: 1589 - protein, 17 aa, Homo Sapien
IETVNESWNALATPSDK

SEQ ID NO: 1590 - protein, 14 aa, Homo Sapien
YQQAGLPLIVLAGK

SEQ ID NO: 1591 - protein, 14 aa, Homo Sapien
GLVDKFPLFMAVYK

SEQ ID NO: 1592 - protein, 9 aa, Homo Sapien
DPAQGQLLK

SEQ ID NO: 1593 - protein, 21 aa, Homo Sapien
LGIPMSVLMGANIASEVADEK

SEQ ID NO: 1594 - protein, 32 aa, Homo Sapien
LPPNVVAVPDVVQAAEDADILIFVVPHQFIGK

SEQ ID NO: 1595 - protein, 13 aa, Homo Sapien
VTMWVFEEDIGGK

SEQ ID NO: 1596 - protein, 14 aa, Homo Sapien
VTMWVFEEDIGGKK

SEQ ID NO: 1597 - protein, 14 aa, Homo Sapien
KLTEIINTQHENVK

SEQ ID NO: 1598 - protein, 10 aa, Homo Sapien
GVDEGPNGLK

SEQ ID NO: 1599 - protein, 11 aa, Homo Sapien
LGLMEMIAFAK

SEQ ID NO: 1600 - protein, 13 aa, Homo Sapien
LTEIINTQHENVK

SEQ ID NO: 1601 - protein, 7 aa, Homo Sapien
SIEQLEK

SEQ ID NO: 1602 - protein, 20 aa, Homo Sapien
VNNSSLIGLGYTQTLKPGIK

SEQ ID NO: 1603 - protein, 21 aa, Homo Sapien
TKSENGLEFTSSGSANTETTK

SEQ ID NO: 1604 - protein, 13 aa, Homo Sapien
LTFDSSFSPNTGK

SEQ ID NO: 1605 - protein, 14 aa, Homo Sapien
LTFDSSFSPNTGKK

SEQ ID NO: 1606 - protein, 9 aa, Homo Sapien
PPTYADLGK

SEQ ID NO: 1607 - protein, 19 aa, Homo Sapien
SENGLEFTSSGSANTETTK

SEQ ID NO: 1608 - protein, 23 aa, Homo Sapien
TDEFQLHTNVNDGTEFGGSIYQK

SEQ ID NO: 1609 - protein, 11 aa, Homo Sapien
VTQSNFAVGYK

SEQ ID NO: 1610 - protein, 11 aa, Homo Sapien
WTEYGLTFTEK

SEQ ID NO: 1611 - protein, 13 aa, Homo Sapien
ESNTFFQVEPNTK

SEQ ID NO: 1612 - protein, 17 aa, Homo Sapien
GGGTHPLLVPYDTLTAK

SEQ ID NO: 1613 - protein, 23 aa, Homo Sapien
HVTTGQYLALTEDQGLVVVDASK

SEQ ID NO: 1614 - protein, 7 aa, Homo Sapien
LDSFINK

SEQ ID NO: 1615 - protein, 21 aa, Homo Sapien
LFPAVFVLPTHQNVIQFELGK

SEQ ID NO: 1616 - protein, 17 aa, Homo Sapien
LVSTLLVMGIFGDEDVK

SEQ ID NO: 1617 - protein, 25 aa, Homo Sapien
MAMPCLCAIAGALPPDYVDASYSSK

SEQ ID NO: 1618 - protein, 15 aa, Homo Sapien
QFIFDVVNEGGEAEK

SEQ ID NO: 1619 - protein, 26 aa, Homo Sapien
SLLIVQMGPQEENLMIQSIGNIMNNK

SEQ ID NO: 1620 - protein, 19 aa, Homo Sapien
VQEVSAVLYYLDQTEHPYK

SEQ ID NO: 1621 - protein, 18 aa, Homo Sapien
VVTVTMGDEQGNVHSSLK

SEQ ID NO: 1622 - protein, 18 aa, Homo Sapien
SKLDEDYLYMAYADIMAK

SEQ ID NO: 1623 - protein, 14 aa, Homo Sapien
AGEQEEEEEEVEEK

SEQ ID NO: 1624 - protein, 22 aa, Homo Sapien
ALGMHETVMEVMVNVLGGGESK

SEQ ID NO: 1625 - protein, 16 aa, Homo Sapien
DPVGGSVEFQFVPVLK

SEQ ID NO: 1626 - protein, 11 aa, Homo Sapien
DVEGMGPPEIK

SEQ ID NO: 1627 - protein, 22 aa, Homo Sapien
EEQNFVVQNEINNMSFLTADNK

SEQ ID NO: 1628 - protein, 12 aa, Homo Sapien
GETGAMVSSTLK

SEQ ID NO: 1629 - protein, 15 aa, Homo Sapien
IIVNNLGIDEASWMK

SEQ ID NO: 1630 - protein, 16 aa, Homo Sapien
IQNNWSYGENIDEELK

SEQ ID NO: 1631 - protein, 12 aa, Homo Sapien
LFWGIFDSLAHK

SEQ ID NO: 1632 - protein, 16 aa, Homo Sapien
LGISILNGGNAEVQQK

SEQ ID NO: 1633 - protein, 15 aa, Homo Sapien
LQESISDFYWYYSGK

SEQ ID NO: 1634 - protein, 13 aa, Homo Sapien
LVFDVPILNEFAK

SEQ ID NO: 1635 - protein, 15 aa, Homo Sapien
LVLNTPSFPSNYWDK

SEQ ID NO: 1636 - protein, 12 aa, Homo Sapien
NYNLQMSGETLK

SEQ ID NO: 1637 - protein, 8 aa, Homo Sapien
PVTTWFSK

SEQ ID NO: 1638 - protein, 18 aa, Homo Sapien
QMVDMLVESSSNVEMILK

SEQ ID NO: 1639 - protein, 10 aa, Homo Sapien
SEDEDEPDMK

SEQ ID NO: 1640 - protein, 12 aa, Homo Sapien
SFFESASEDIEK

SEQ ID NO: 1641 - protein, 13 aa, Homo Sapien
YSVQTSLIVATLK

SEQ ID NO: 1642 - protein, 14 aa, Homo Sapien
YSVQTSLIVATLKK

SEQ ID NO: 1643 - protein, 14 aa, Homo Sapien
DLVPDLSNFYAQYK

SEQ ID NO: 1644 - protein, 11 aa, Homo Sapien
IYPLPHMYVIK

SEQ ID NO: 1645 - protein, 10 aa, Homo Sapien
NEFGEIQGDK

SEQ ID NO: 1646 - protein, 10 aa, Homo Sapien
DLYLENPEIK

SEQ ID NO: 1647 - protein, 17 aa, Homo Sapien
GATVLPANTPGNVGSGK

SEQ ID NO: 1648 - protein, 19 aa, Homo Sapien
LILPVGPAGGNQMLEQYDK

SEQ ID NO: 1649 - protein, 15 aa, Homo Sapien
LGPISADSTTAPLEK

SEQ ID NO: 1650 - protein, 12 aa, Homo Sapien
YLVTLYGFSDGK

SEQ ID NO: 1651 - protein, 18 aa, Homo Sapien
AAVATFLQSVQVPEFTPK

SEQ ID NO: 1652 - protein, 23 aa, Homo Sapien
GNVQVVIPFLTESYSSSQDPPEK

SEQ ID NO: 1653 - protein, 8 aa, Homo Sapien
NIILGGVK

SEQ ID NO: 1654 - protein, 11 aa, Homo Sapien
QLYVLGHEAMK

SEQ ID NO: 1655 - protein, 14 aa, Homo Sapien
QPAENVNQYLTDPK

SEQ ID NO: 1656 - protein, 15 aa, Homo Sapien
YDGQVAVFGSDLQEK

SEQ ID NO: 1657 - protein, 13 aa, Homo Sapien
ATLPSPDKLPGFK

SEQ ID NO: 1658 - protein, 12 aa, Homo Sapien
KPLLESGTLGTK

SEQ ID NO: 1659 - protein, 10 aa, Homo Sapien
NIIHGSDSVK

SEQ ID NO: 1660 - protein, 19 aa, Homo Sapien
YMNSGPVVAMVWEGLNVVK

SEQ ID NO: 1661 - protein, 15 aa, Homo Sapien
GFGFVTFDDHDPVDK

SEQ ID NO: 1662 - protein, 20 aa, Homo Sapien
GFGFVTFDDHDPVDKIVLQK

SEQ ID NO: 1663 - protein, 19 aa, Homo Sapien
ATAAPAGAPPQPQDLEFTK

SEQ ID NO: 1664 - protein, 14 aa, Homo Sapien
GSNTTSHLHQAVAK

SEQ ID NO: 1665 - protein, 8 aa, Homo Sapien
LTSSLTTK

SEQ ID NO: 1666 - protein, 14 aa, Homo Sapien
MALIGLGVSHPVLK

SEQ ID NO: 1667 - protein, 16 aa, Homo Sapien
TIAQGNLSNTDVQAAK

SEQ ID NO: 1668 - protein, 11 aa, Homo Sapien
WEVADLQPQLK

SEQ ID NO: 1669 - protein, 11 aa, Homo Sapien
SPKPQEWTLEK

SEQ ID NO: 1670 - protein, 16 aa, Homo Sapien
KTVNLSIPLSETSSTK

SEQ ID NO: 1671 - protein, 8 aa, Homo Sapien
PQEWTLEK

SEQ ID NO: 1672 - protein, 15 aa, Homo Sapien
TVNLSIPLSETSSTK

SEQ ID NO: 1673 - protein, 15 aa, Homo Sapien
EPLMEEYAIAAQVFK

SEQ ID NO: 1674 - protein, 10 aa, Homo Sapien
EVGADLVEAK

SEQ ID NO: 1675 - protein, 13 aa, Homo Sapien
HITGFDSVDDESK

SEQ ID NO: 1676 - protein, 9 aa, Homo Sapien
NPFLDFLQK

SEQ ID NO: 1677 - protein, 19 aa, Homo Sapien
PVIVEPLEQLDDEDGLPEK

SEQ ID NO: 1678 - protein, 22 aa, Homo Sapien
ELLQTELSGFLDAQKDVDAVDK

SEQ ID NO: 1679 - protein, 15 aa, Homo Sapien
ELLQTELSGFLDAQK

SEQ ID NO: 1680 - protein, 11 aa, Homo Sapien
SDEEDFQDEYK

SEQ ID NO: 1681 - protein, 17 aa, Homo Sapien
MSASDPNSSIFLTDTAK

SEQ ID NO: 1682 - protein, 10 aa, Homo Sapien
IMLPWDPTGK

SEQ ID NO: 1683 - protein, 15 aa, Homo Sapien
GISEETTTGVHNLYK

SEQ ID NO: 1684 - protein, 12 aa, Homo Sapien
VPAINVNDSVTK

SEQ ID NO: 1685 - protein, 13 aa, Homo Sapien
KLDEAVAEAHLGK

SEQ ID NO: 1686 - protein, 28 aa, Homo Sapien
NIILEEGKEILVGDVGQTVDDPYATFVK

SEQ ID NO: 1687 - protein, 20 aa, Homo Sapien
EILVGDVGQTVDDPYATFVK

SEQ ID NO: 1688 - protein, 15 aa, Homo Sapien
AGLLEPEVFHLNPAK

SEQ ID NO: 1689 - protein, 10 aa, Homo Sapien
LNFELTDALK

SEQ ID NO: 1690 - protein, 12 aa, Homo Sapien
GTGKPLEVNFAK

SEQ ID NO: 1691 - protein, 19 aa, Homo Sapien
AEQTILPLVDEALQHTTTK

SEQ ID NO: 1692 - protein, 11 aa, Homo Sapien
GTYFDGTGFAK

SEQ ID NO: 1693 - protein, 18 aa, Homo Sapien
LADEINSIIDYVEDIQTK

SEQ ID NO: 1694 - protein, 12 aa, Homo Sapien
MDGMGIEMIDEK

SEQ ID NO: 1695 - protein, 19 aa, Homo Sapien
QALPHSYYWSAPAPYLGNK

SEQ ID NO: 1696 - protein, 22 aa, Homo Sapien
VSYDLGSGMASVVSNQNHNDGK

SEQ ID NO: 1697 - protein, 10 aa, Homo Sapien
HPITNAIDGK

SEQ ID NO: 1698 - protein, 15 aa, Homo Sapien
TAVADNLLFYLGSAK

SEQ ID NO: 1699 - protein, 16 aa, Homo Sapien
TPYNILSSPDYVGVTK

SEQ ID NO: 1700 - protein, 26 aa, Homo Sapien
DGGIPADPNNVFLSTGASDAIVTVLK

SEQ ID NO: 1701 - protein, 9 aa, Homo Sapien
LVPVGYGIK

SEQ ID NO: 1702 - protein, 15 aa, Homo Sapien
SPAGLQVLNDYLADK

SEQ ID NO: 1703 - protein, 13 aa, Homo Sapien
SIQADGLVWGSSK

SEQ ID NO: 1704 - protein, 17 aa, Homo Sapien
HVVQSISTQQEKETIAK

SEQ ID NO: 1705 - protein, 16 aa, Homo Sapien
YGPFVADFADKLNEQK

SEQ ID NO: 1706 - protein, 11 aa, Homo Sapien
EQEHMINWVEK

SEQ ID NO: 1707 - protein, 12 aa, Homo Sapien
HVVQSISTQQEK

SEQ ID NO: 1708 - protein, 8 aa, Homo Sapien
LAQLEEAK

SEQ ID NO: 1709 - protein, 11 aa, Homo Sapien
PVPPLPEYGGK

SEQ ID NO: 1710 - protein, 15 aa, Homo Sapien
QASIQHIQNAIDTEK

SEQ ID NO: 1711 - protein, 11 aa, Homo Sapien
YGPFVADFADK

SEQ ID NO: 1712 - protein, 20 aa, Homo Sapien
AAWEAGKFGNEVIPVTVTVK

SEQ ID NO: 1713 - protein, 16 aa, Homo Sapien
GSTPYGGVKLEDLIVK

SEQ ID NO: 1714 - protein, 9 aa, Homo Sapien
DGLTDVYNK

SEQ ID NO: 1715 - protein, 29 aa, Homo Sapien
ENGTVTAANASTLNDGAAALVLMTADAAK

SEQ ID NO: 1716 - protein, 13 aa, Homo Sapien
FGNEVIPVTVTVK

SEQ ID NO: 1717 - protein, 27 aa, Homo Sapien
IVAFADAAVEPIDFPIAPVYAASMVLK

SEQ ID NO: 1718 - protein, 10 aa, Homo Sapien
IVGHLTHALK

SEQ ID NO: 1719 - protein, 17 aa, Homo Sapien
TPIGSFLGSLSLLPATK

SEQ ID NO: 1720 - protein, 16 aa, Homo Sapien
LEDLIVKDGLTDVYNK

SEQ ID NO: 1721 - protein, 12 aa, Homo Sapien
GQPYIDEVGTFK

SEQ ID NO: 1722 - protein, 11 aa, Homo Sapien
TSQVTLYVFEK

SEQ ID NO: 1723 - protein, 10 aa, Homo Sapien
GYLDKLEPSK

SEQ ID NO: 1724 - protein, 8 aa, Homo Sapien
LTDADAMK

SEQ ID NO: 1725 - protein, 6 aa, Homo Sapien
LTEILK

SEQ ID NO: 1726 - protein, 6 aa, Homo Sapien
LTELLK

SEQ ID NO: 1727 - protein, 8 aa, Homo Sapien
STVAQLVK

SEQ ID NO: 1728 - protein, 18 aa, Homo Sapien
VVDALGNAIDGKGPIGSK

SEQ ID NO: 1729 - protein, 8 aa, Homo Sapien
LDKLEPSK

SEQ ID NO: 1730 - protein, 23 aa, Homo Sapien
GMSLNLEPDNVGVVVFGNDKLIK

SEQ ID NO: 1731 - protein, 20 aa, Homo Sapien
GMSLNLEPDNVGVVVFGNDK

SEQ ID NO: 1732 - protein, 11 aa, Homo Sapien
HALIIYDDLSK

SEQ ID NO: 1733 - protein, 15 aa, Homo Sapien
NVQAEEMVEFSSGLK

SEQ ID NO: 1734 - protein, 12 aa, Homo Sapien
TSIAIDTIINQK

SEQ ID NO: 1735 - protein, 12 aa, Homo Sapien
VVDALGNAIDGK

SEQ ID NO: 1736 - protein, 10 aa, Homo Sapien
AQMVQEDLEK

SEQ ID NO: 1737 - protein, 15 aa, Homo Sapien
IETMLGDVAVAVHPK

SEQ ID NO: 1738 - protein, 14 aa, Homo Sapien
EYFSWEGAFQHVGK

SEQ ID NO: 1739 - protein, 10 aa, Homo Sapien
ILGLLDAYLK

SEQ ID NO: 1740 - protein, 7 aa, Homo Sapien
MAQFDAK

SEQ ID NO: 1741 - protein, 13 aa, Homo Sapien
APLAEEWDNMTMK

SEQ ID NO: 1742 - protein, 16 aa, Homo Sapien
ENVLVETLNHEMYEAK

SEQ ID NO: 1743 - protein, 16 aa, Homo Sapien
VLGSLEALEPVHYEEK

SEQ ID NO: 1744 - protein, 8 aa, Homo Sapien
VPLGSVIK

SEQ ID NO: 1745 - protein, 13 aa, Homo Sapien
YVISAIPPTLGMK

SEQ ID NO: 1746 - protein, 13 aa, Homo Sapien
FNADEFEDMVAEK

SEQ ID NO: 1747 - protein, 12 aa, Homo Sapien
QPAPTTIGGLNK

SEQ ID NO: 1748 - protein, 10 aa, Homo Sapien
GTLSGWILSK

SEQ ID NO: 1749 - protein, 13 aa, Homo Sapien
IVDDWANDGWGLK

SEQ ID NO: 1750 - protein, 9 aa, Homo Sapien
PVIDNPNYK

SEQ ID NO: 1751 - protein, 12 aa, Homo Sapien
TPELNLDQFHDK

SEQ ID NO: 1752 - protein, 13 aa, Homo Sapien
ITSPLMEPSSIEK

SEQ ID NO: 1753 - protein, 20 aa, Homo Sapien
VNNSTMLGASGDYADFQYLK

SEQ ID NO: 1754 - protein, 15 aa, Homo Sapien
TQNPMVTGTSVLGVK

SEQ ID NO: 1755 - protein, 10 aa, Homo Sapien
LLANMVYQYK

SEQ ID NO: 1756 - protein, 12 aa, Homo Sapien
VSSDNVADLHEK

SEQ ID NO: 1757 - protein, 13 aa, Homo Sapien
ATAGAYIASQTVK

SEQ ID NO: 1758 - protein, 17 aa, Homo Sapien
LGLDFPNLPYLIDGTHK

SEQ ID NO: 1759 - protein, 8 aa, Homo Sapien
LYSQFLGK

SEQ ID NO: 1760 - protein, 11 aa, Homo Sapien
LADLTGPIIPK

SEQ ID NO: 1761 - protein, 17 aa, Homo Sapien
ILQDIASGSHPFSQVLK

SEQ ID NO: 1762 - protein, 10 aa, Homo Sapien
MTSGVTGDWK

SEQ ID NO: 1763 - protein, 11 aa, Homo Sapien
VAGMLQSFQGK

SEQ ID NO: 1764 - protein, 22 aa, Homo Sapien
VALIGSPVDLTYTYDHLGDSPK

SEQ ID NO: 1765 - protein, 12 aa, Homo Sapien
GNDMQVGTYIEK

SEQ ID NO: 1766 - protein, 10 aa, Homo Sapien
GWNILTNSEK

SEQ ID NO: 1767 - protein, 9 aa, Homo Sapien
YDHLGDSPK

SEQ ID NO: 1768 - protein, 17 aa, Homo Sapien
KADVIPVHYYLIPPPTK

SEQ ID NO: 1769 - protein, 8 aa, Homo Sapien
FDVQSSLK

SEQ ID NO: 1770 - protein, 10 aa, Homo Sapien
VPITAVIAAK

SEQ ID NO: 1771 - protein, 12 aa, Homo Sapien
AVDLSHQPPAGK

SEQ ID NO: 1772 - protein, 9 aa, Homo Sapien
DTELIYGAK

SEQ ID NO: 1773 - protein, 12 aa, Homo Sapien
FNSVSSYSDSQK

SEQ ID NO: 1774 - protein, 14 aa, Homo Sapien
GNVPVVLNNPYSEK

SEQ ID NO: 1775 - protein, 12 aa, Homo Sapien
LEDAPPVNQMVK

SEQ ID NO: 1776 - protein, 19 aa, Homo Sapien
LTFVAEAPELTQGLSNVHK

SEQ ID NO: 1777 - protein, 12 aa, Homo Sapien
GVVQELQQAISK

SEQ ID NO: 1778 - protein, 13 aa, Homo Sapien
SIQLDGLVWGASK

SEQ ID NO: 1779 - protein, 12 aa, Homo Sapien
SSPSLTILAGGK

SEQ ID NO: 1780 - protein, 11 aa, Homo Sapien
NAAGNFYINDK

SEQ ID NO: 1781 - protein, 9 aa, Homo Sapien
SAFEYGGQK

SEQ ID NO: 1782 - protein, 17 aa, Homo Sapien
ELAILLGMLDPAEKDEK

SEQ ID NO: 1783 - protein, 17 aa, Homo Sapien
DGDSVMVLPTIPEEEAK

SEQ ID NO: 1784 - protein, 14 aa, Homo Sapien
ELAILLGMLDPAEK

SEQ ID NO: 1785 - protein, 17 aa, Homo Sapien
LIALSIDSVEDHLAWSK

SEQ ID NO: 1786 - protein, 9 aa, Homo Sapien
VVFVFGPDK

SEQ ID NO: 1787 - protein, 10 aa, Homo Sapien
VVFVFGPDKK

SEQ ID NO: 1788 - protein, 8 aa, Homo Sapien
KVLELTGK

SEQ ID NO: 1789 - protein, 26 aa, Homo Sapien
GVEVTVGHEQEEGGKWPYAGTAEAIK

SEQ ID NO: 1790 - protein, 15 aa, Homo Sapien
GVEVTVGHEQEEGGK

SEQ ID NO: 1791 - protein, 11 aa, Homo Sapien
FSMVVQDGIVK

SEQ ID NO: 1792 - protein, 14 aa, Homo Sapien
THLPGFVEQAEALK

SEQ ID NO: 1793 - protein, 18 aa, Homo Sapien
VGDAIPAVEVFEGEPGNK

SEQ ID NO: 1794 - protein, 8 aa, Homo Sapien
VNLAELFK

SEQ ID NO: 1795 - protein, 12 aa, Homo Sapien
APAVTQHAPYFK

SEQ ID NO: 1796 - protein, 12 aa, Homo Sapien
GLFIIDPNGVIK

SEQ ID NO: 1797 - protein, 17 aa, Homo Sapien
NGGLGHMNIALLSDLTK

SEQ ID NO: 1798 - protein, 13 aa, Homo Sapien
ASGANFEYIIAEK

SEQ ID NO: 1799 - protein, 9 aa, Homo Sapien
EGMTAFVEK

SEQ ID NO: 1800 - protein, 17 aa, Homo Sapien
SVDEVFDEVVQIFDKEG

SEQ ID NO: 1801 - protein, 12 aa, Homo Sapien
EMDQTMAANAQK

SEQ ID NO: 1802 - protein, 11 aa, Homo Sapien
EWHHFLVVNMK

SEQ ID NO: 1803 - protein, 20 aa, Homo Sapien
GNDISSGTVLSDYVGSGPPK

SEQ ID NO: 1804 - protein, 32 aa, Homo Sapien
WSGPLSLQEVDEQPQHPLHVTYAGAAVDELGK

SEQ ID NO: 1805 - protein, 26 aa, Homo Sapien
FISDKDASIVGFFDDSFSEAHSEFLK

SEQ ID NO: 1806 - protein, 8 aa, Homo Sapien
AVGPEITK

SEQ ID NO: 1807 - protein, 20 aa, Homo Sapien
IGPILDNSTLQSEVKPILEK

SEQ ID NO: 1808 - protein, 20 aa, Homo Sapien
AISHEHSPSDLEAHFVPLVK

SEQ ID NO: 1809 - protein, 11 aa, Homo Sapien
ELVSDANQHVK

SEQ ID NO: 1810 - protein, 10 aa, Homo Sapien
LTQDQDVDVK

SEQ ID NO: 1811 - protein, 8 aa, Homo Sapien
VLELDNVK

SEQ ID NO: 1812 - protein, 14 aa, Homo Sapien
LLANLKEMEEPFEK

SEQ ID NO: 1813 - protein, 18 aa, Homo Sapien
FLEEEVYPLLKPYESVMK

SEQ ID NO: 1814 - protein, 25 aa, Homo Sapien
GTTGTQASFLQLFEGDDHKVEQLDK

SEQ ID NO: 1815 - protein, 21 aa, Homo Sapien
ASLPTLGFTHFQPAQLTTVGK

SEQ ID NO: 1816 - protein, 9 aa, Homo Sapien
NALDLLLPK

SEQ ID NO: 1817 - protein, 9 aa, Homo Sapien
SNLENIDFK

SEQ ID NO: 1818 - protein, 19 aa, Homo Sapien
KVDIEVLSVLASLGASVHK

SEQ ID NO: 1819 - protein, 17 aa, Homo Sapien
QELPFMATENIIMAMVK

SEQ ID NO: 1820 - protein, 13 aa, Homo Sapien
SQQLSALQEENVK

SEQ ID NO: 1821 - protein, 18 aa, Homo Sapien
SISITSALLTEKDAELEK

SEQ ID NO: 1822 - protein, 12 aa, Homo Sapien
TKHEEILQNLQK

SEQ ID NO: 1823 - protein, 17 aa, Homo Sapien
AAQTAEDAMQIMEQMTK

SEQ ID NO: 1824 - protein, 13 aa, Homo Sapien
DGHDQHVLELEAK

SEQ ID NO: 1825 - protein, 11 aa, Homo Sapien
SVLNNQLLEMK

SEQ ID NO: 1826 - protein, 15 aa, Homo Sapien
GQHLSDAFAQVNPLK

SEQ ID NO: 1827 - protein, 17 aa, Homo Sapien
VAEQTPLSALYLASLIK

SEQ ID NO: 1828 - protein, 13 aa, Homo Sapien
KHTLSYVDVGTGK

SEQ ID NO: 1829 - protein, 18 aa, Homo Sapien
VPPIKPNAGEESVMNLDK

SEQ ID NO: 1830 - protein, 21 aa, Homo Sapien
EPIPVLPTVHYNMGGIPTNYK

SEQ ID NO: 1831 - protein, 8 aa, Homo Sapien
WHFYDTVK

SEQ ID NO: 1832 - protein, 19 aa, Homo Sapien
VPSTETEALASNLMGMFEK

SEQ ID NO: 1833 - protein, 14 aa, Homo Sapien
KLGLTEVDSMYVFK

SEQ ID NO: 1834 - protein, 25 aa, Homo Sapien
AFEDAAEEFHPYIPFFATFDSKVAK

SEQ ID NO: 1835 - protein, 16 aa, Homo Sapien
AEEADPDGFEFLETLK

SEQ ID NO: 1836 - protein, 22 aa, Homo Sapien
AFEDAAEEFHPYIPFFATFDSK

SEQ ID NO: 1837 - protein, 7 aa, Homo Sapien
FATFDSK

SEQ ID NO: 1838 - protein, 13 aa, Homo Sapien
LGLTEVDSMYVFK

SEQ ID NO: 1839 - protein, 17 aa, Homo Sapien
GVGFGLVDSEKDAAVAK

SEQ ID NO: 1840 - protein, 16 aa, Homo Sapien
VGFGLVDSEKDAAVAK

SEQ ID NO: 1841 - protein, 19 aa, Homo Sapien
ELQAFENIEDEIKLIGYFK

SEQ ID NO: 1842 - protein, 17 aa, Homo Sapien
KYEVLALLYHEPPEDDK

SEQ ID NO: 1843 - protein, 13 aa, Homo Sapien
ELQAFENIEDEIK

SEQ ID NO: 1844 - protein, 11 aa, Homo Sapien
GVGFGLVDSEK

SEQ ID NO: 1845 - protein, 16 aa, Homo Sapien
YEVLALLYHEPPEDDK

SEQ ID NO: 1846 - protein, 12 aa, Homo Sapien
ADLTEYLSTHYK

SEQ ID NO: 1847 - protein, 8 aa, Homo Sapien
EHTAYYIK

SEQ ID NO: 1848 - protein, 20 aa, Homo Sapien
MVLAAAGGVEHQQLLDLAQK

SEQ ID NO: 1849 - protein, 14 aa, Homo Sapien
NNGAGYFLEHLAFK

SEQ ID NO: 1850 - protein, 16 aa, Homo Sapien
ALFEEVPELLTEAEKK

SEQ ID NO: 1851 - protein, 12 aa, Homo Sapien
EALGIPAAASFK

SEQ ID NO: 1852 - protein, 11 aa, Homo Sapien
GQLALFSVSDK

SEQ ID NO: 1853 - protein, 16 aa, Homo Sapien
SGVAYIAAPSGSAADK

SEQ ID NO: 1854 - protein, 16 aa, Homo Sapien
TYEEGLKHEANNPQLK

SEQ ID NO: 1855 - protein, 10 aa, Homo Sapien
TVDLKPDWGK

SEQ ID NO: 1856 - protein, 16 aa, Homo Sapien
ETKPEPMEEDLPENKK

SEQ ID NO: 1857 - protein, 10 aa, Homo Sapien
YKDAIHFYNK

SEQ ID NO: 1858 - protein, 10 aa, Homo Sapien
IGNSYFKEEK

SEQ ID NO: 1859 - protein, 17 aa, Homo Sapien
DPQALSEHLKNPVIAQK

SEQ ID NO: 1860 - protein, 13 aa, Homo Sapien
LAYINPDLALEEK

SEQ ID NO: 1861 - protein, 13 aa, Homo Sapien
ATAVVDGAFKEVK

SEQ ID NO: 1862 - protein, 10 aa, Homo Sapien
ATAVVDGAFK

SEQ ID NO: 1863 - protein, 9 aa, Homo Sapien
LSEDYGVLK

SEQ ID NO: 1864 - protein, 19 aa, Homo Sapien
TILSNQTVDIPENVDITLK

SEQ ID NO: 1865 - protein, 14 aa, Homo Sapien
DFNHINVELSLLGK

SEQ ID NO: 1866 - protein, 11 aa, Homo Sapien
LITDLQDQNQK

SEQ ID NO: 1867 - protein, 13 aa, Homo Sapien
SATLASIDAELQK

SEQ ID NO: 1868 - protein, 13 aa, Homo Sapien
ISFLENNLEQLTK

SEQ ID NO: 1869 - protein, 11 aa, Homo Sapien
LYLVDLAGSEK

SEQ ID NO: 1870 - protein, 12 aa, Homo Sapien
SLTEYLQNVEQK

SEQ ID NO: 1871 - protein, 12 aa, Homo Sapien
TGAEGAVLDEAK

SEQ ID NO: 1872 - protein, 12 aa, Homo Sapien
ALSEALTELGYK

SEQ ID NO: 1873 - protein, 36 aa, Homo Sapien
MQVDQEEPHVEEQQQQTPAENKAESEEMETSQAGSK

SEQ ID NO: 1874 - protein, 16 aa, Homo Sapien
NKEDQYDHLDAADMTK

SEQ ID NO: 1875 - protein, 12 aa, Homo Sapien
EMLNLYIENEGK

SEQ ID NO: 1876 - protein, 14 aa, Homo Sapien
NFTTEQVTAMLLSK

SEQ ID NO: 1877 - protein, 14 aa, Homo Sapien
AESEEMETSQAGSK

SEQ ID NO: 1878 - protein, 11 aa, Homo Sapien
AFSDPFVEAEK

SEQ ID NO: 1879 - protein, 17 aa, Homo Sapien
LEDTENWLYEDGEDQPK

SEQ ID NO: 1880 - protein, 21 aa, Homo Sapien
SQEDPYLSIYDPPVPDFTIMK

SEQ ID NO: 1881 - protein, 16 aa, Homo Sapien
TLSQWIAENQDSLGSK

SEQ ID NO: 1882 - protein, 12 aa, Homo Sapien
IAEQVASFQEEK

SEQ ID NO: 1883 - protein, 20 aa, Homo Sapien
AATFGLILDDVSLTHLTFGK

SEQ ID NO: 1884 - protein, 11 aa, Homo Sapien
VLPSITTEILK

SEQ ID NO: 1885 - protein, 15 aa, Homo Sapien
GNTAAQMAQILSFNK

SEQ ID NO: 1886 - protein, 12 aa, Homo Sapien
NLGMTDAFELGK

SEQ ID NO: 1887 - protein, 20 aa, Homo Sapien
SGGGGDIHQGFQSLLTEVNK

SEQ ID NO: 1888 - protein, 8 aa, Homo Sapien
KENPLQFK

SEQ ID NO: 1889 - protein, 10 aa, Homo Sapien
LKQIEEQTIK

SEQ ID NO: 1890 - protein, 13 aa, Homo Sapien
KTQNDVLHAENVK

SEQ ID NO: 1891 - protein, 10 aa, Homo Sapien
AFAAQEDLEK

SEQ ID NO: 1892 - protein, 12 aa, Homo Sapien
TQNDVLHAENVK

SEQ ID NO: 1893 - protein, 30 aa, Homo Sapien
KDIENQYETQITQIEHEVSSSGQEVQSSAK

SEQ ID NO: 1894 - protein, 25 aa, Homo Sapien
NYSPYYNTIDDLKDQIVDLTVGNNK

SEQ ID NO: 1895 - protein, 20 aa, Homo Sapien
YNTIDDLKDQIVDLTVGNNK

SEQ ID NO: 1896 - protein, 21 aa, Homo Sapien
LASYLDKVQALEEANNDLENK

SEQ ID NO: 1897 - protein, 29 aa, Homo Sapien
DIENQYETQITQIEHEVSSSGQEVQSSAK

SEQ ID NO: 1898 - protein, 14 aa, Homo Sapien
EGGQEDFESSGAGK

SEQ ID NO: 1899 - protein, 23 aa, Homo Sapien
EIETYHNLLEGGQEDFESSGAGK

SEQ ID NO: 1900 - protein, 17 aa, Homo Sapien
GGGAGGGDGGILTANEK

SEQ ID NO: 1901 - protein, 40 aa, Homo Sapien
GGSGGSHGGGSGFGGESGGSYGGGEEASGSGGGYGGGSGK

SEQ ID NO: 1902 - protein, 16 aa, Homo Sapien
HGVQELEIELQSQLSK

SEQ ID NO: 1903 - protein, 17 aa, Homo Sapien
HGVQELEIELQSQLSKK

SEQ ID NO: 1904 - protein, 18 aa, Homo Sapien
HNLLEGGQEDFESSGAGK

SEQ ID NO: 1905 - protein, 13 aa, Homo Sapien
NYSPYYNTIDDLK

SEQ ID NO: 1906 - protein, 9 aa, Homo Sapien
QEYEQLIAK

SEQ ID NO: 1907 - protein, 10 aa, Homo Sapien
QVLDNLTMEK

SEQ ID NO: 1908 - protein, 18 aa, Homo Sapien
SDLEMQYETLQEELMALK

SEQ ID NO: 1909 - protein, 19 aa, Homo Sapien
SDLEMQYETLQEELMALKK

SEQ ID NO: 1910 - protein, 22 aa, Homo Sapien
TQITQIEHEVSSSGQEVQSSAK

SEQ ID NO: 1911 - protein, 14 aa, Homo Sapien
VQALEEANNDLENK

SEQ ID NO: 1912 - protein, 21 aa, Homo Sapien
LFHVSEDPSDLNEKHPNLVHK

SEQ ID NO: 1913 - protein, 8 aa, Homo Sapien
KIQDNFEK

SEQ ID NO: 1914 - protein, 12 aa, Homo Sapien
KNIFPYHEVTVK

SEQ ID NO: 1915 - protein, 12 aa, Homo Sapien
DGSAVEIVGLSK

SEQ ID NO: 1916 - protein, 14 aa, Homo Sapien
LFHVSEDPSDLNEK

SEQ ID NO: 1917 - protein, 10 aa, Homo Sapien
MVPNGLDILK

SEQ ID NO: 1918 - protein, 11 aa, Homo Sapien
NHLTQFSPHFK

SEQ ID NO: 1919 - protein, 11 aa, Homo Sapien
NIFPYHEVTVK

SEQ ID NO: 1920 - protein, 14 aa, Homo Sapien
QMSSFVQNGSTFVK

SEQ ID NO: 1921 - protein, 9 aa, Homo Sapien
SGTIAEVGK

SEQ ID NO: 1922 - protein, 11 aa, Homo Sapien
VVAPELFTTEK

SEQ ID NO: 1923 - protein, 7 aa, Homo Sapien
WLLELSK

SEQ ID NO: 1924 - protein, 12 aa, Homo Sapien
YTWNDVGQLVEK

SEQ ID NO: 1925 - protein, 12 aa, Homo Sapien
ILLLNEMEKLEK

SEQ ID NO: 1926 - protein, 9 aa, Homo Sapien
KLLGPLGMK

SEQ ID NO: 1927 - protein, 9 aa, Homo Sapien
ILLLNEMEK

SEQ ID NO: 1928 - protein, 8 aa, Homo Sapien
LGPTLQGK

SEQ ID NO: 1929 - protein, 8 aa, Homo Sapien
LLGPLGMK

SEQ ID NO: 1930 - protein, 14 aa, Homo Sapien
SGSLAVDNADPILK

SEQ ID NO: 1931 - protein, 10 aa, Homo Sapien
HSEVQQANLK

SEQ ID NO: 1932 - protein, 18 aa, Homo Sapien
ASTHETWAYGKEQILLQK

SEQ ID NO: 1933 - protein, 21 aa, Homo Sapien
NIDKLEGDHQLIQEALVFDNK

SEQ ID NO: 1934 - protein, 13 aa, Homo Sapien
ITGALEDQMNQLK

SEQ ID NO: 1935 - protein, 19 aa, Homo Sapien
IVHSIEEIQSLITAHEQFK

SEQ ID NO: 1936 - protein, 17 aa, Homo Sapien
LEGDHQLIQEALVFDNK

SEQ ID NO: 1937 - protein, 14 aa, Homo Sapien
PIGNINLAMEIAEK

SEQ ID NO: 1938 - protein, 12 aa, Homo Sapien
QSIMAIQNEVEK

SEQ ID NO: 1939 - protein, 16 aa, Homo Sapien
SIEEIQSLITAHEQFK

SEQ ID NO: 1940 - protein, 9 aa, Homo Sapien
THETWAYGK

SEQ ID NO: 1941 - protein, 7 aa, Homo Sapien
TMQAMQK

SEQ ID NO: 1942 - protein, 11 aa, Homo Sapien
VNIQNFHTSWK

SEQ ID NO: 1943 - protein, 19 aa, Homo Sapien
LNKDDPIGNINLAMEIAEK

SEQ ID NO: 1944 - protein, 22 aa, Homo Sapien
NNIDKLEGDHQLIQEALVFDNK

SEQ ID NO: 1945 - protein, 9 aa, Homo Sapien
AIGPWIQNK

SEQ ID NO: 1946 - protein, 8 aa, Homo Sapien
ALDYIASK

SEQ ID NO: 1947 - protein, 11 aa, Homo Sapien
ASTHETWAYGK

SEQ ID NO: 1948 - protein, 7 aa, Homo Sapien
EQILLQK

SEQ ID NO: 1949 - protein, 7 aa, Homo Sapien
EQLLLQK

SEQ ID NO: 1950 - protein, 14 aa, Homo Sapien
LLETIDQLHLEFAK

SEQ ID NO: 1951 - protein, 12 aa, Homo Sapien
NVNIQNFHTSWK

SEQ ID NO: 1952 - protein, 16 aa, Homo Sapien
QFAAQANAIGPWIQNK

SEQ ID NO: 1953 - protein, 10 aa, Homo Sapien
QYEHNIINYK

SEQ ID NO: 1954 - protein, 17 aa, Homo Sapien
SSIQITGALEDQMNQLK

SEQ ID NO: 1955 - protein, 14 aa, Homo Sapien
GGVVLKEDALPGQK

SEQ ID NO: 1956 - protein, 14 aa, Homo Sapien
SESVPPVTDWAWYK

SEQ ID NO: 1957 - protein, 12 aa, Homo Sapien
SKEEAEALYHSK

SEQ ID NO: 1958 - protein, 14 aa, Homo Sapien
NKLNDLEEALQQAK

SEQ ID NO: 1959 - protein, 9 aa, Homo Sapien
DVDNAYMIK

SEQ ID NO: 1960 - protein, 44 aa, Homo Sapien
FGGFGGPGGVGGLGGPGGFGPGGYPGGIHEVSVNQSLLQPLNVK

SEQ ID NO: 1961 - protein, 15 aa, Homo Sapien
GGSISGGGYGSGGGK

SEQ ID NO: 1962 - protein, 20 aa, Homo Sapien
GGSSSGGGYGSGGGGSSSVK

SEQ ID NO: 1963 - protein, 12 aa, Homo Sapien
LNDLEEALQQAK

SEQ ID NO: 1964 - protein, 9 aa, Homo Sapien
LQGEIAHVK

SEQ ID NO: 1965 - protein, 9 aa, Homo Sapien
SLVGLGGTK

SEQ ID NO: 1966 - protein, 11 aa, Homo Sapien
TAAENDFVTLK

SEQ ID NO: 1967 - protein, 12 aa, Homo Sapien
TAAENDFVTLKK

SEQ ID NO: 1968 - protein, 18 aa, Homo Sapien
TSQNSELNNMQDLVEDYK

SEQ ID NO: 1969 - protein, 19 aa, Homo Sapien
TSQNSELNNMQDLVEDYKK

SEQ ID NO: 1970 - protein, 12 aa, Homo Sapien
VDLLNQEIEFLK

SEQ ID NO: 1971 - protein, 9 aa, Homo Sapien
VDPEIQNVK

SEQ ID NO: 1972 - protein, 9 aa, Homo Sapien
VIGSELVQK

SEQ ID NO: 1973 - protein, 9 aa, Homo Sapien
KINELTGIK

SEQ ID NO: 1974 - protein, 16 aa, Homo Sapien
IINADSEDPKYIINVK

SEQ ID NO: 1975 - protein, 12 aa, Homo Sapien
IYGLGSLALYEK

SEQ ID NO: 1976 - protein, 11 aa, Homo Sapien
SEVATLTAAGK

SEQ ID NO: 1977 - protein, 11 aa, Homo Sapien
THSDQFLVAFK

SEQ ID NO: 1978 - protein, 14 aa, Homo Sapien
QLEVEPEEPEAENK

SEQ ID NO: 1979 - protein, 13 aa, Homo Sapien
TENPLILIDEVDK

SEQ ID NO: 1980 - protein, 16 aa, Homo Sapien
AQAVLEEDHYGMEDVK

SEQ ID NO: 1981 - protein, 13 aa, Homo Sapien
FSVGGMTDVAEIK

SEQ ID NO: 1982 - protein, 11 aa, Homo Sapien
LAQPYVGVFLK

SEQ ID NO: 1983 - protein, 22 aa, Homo Sapien
FNISNGGPAPEAITDKIFQISK

SEQ ID NO: 1984 - protein, 9 aa, Homo Sapien
SIFDFSALK

SEQ ID NO: 1985 - protein, 13 aa, Homo Sapien
QSVEDILKDHWQK

SEQ ID NO: 1986 - protein, 12 aa, Homo Sapien
LYIDSYEKDVAK

SEQ ID NO: 1987 - protein, 9 aa, Homo Sapien
KQSVEDILK

SEQ ID NO: 1988 - protein, 13 aa, Homo Sapien
QFSANDKVYTVEK

SEQ ID NO: 1989 - protein, 23 aa, Homo Sapien
AIGGIILTASHNPGGPNGDFGIK

SEQ ID NO: 1990 - protein, 10 aa, Homo Sapien
FFGNLMDASK

SEQ ID NO: 1991 - protein, 16 aa, Homo Sapien
FNISNGGPAPEAITDK

SEQ ID NO: 1992 - protein, 9 aa, Homo Sapien
HGVVGPYVK

SEQ ID NO: 1993 - protein, 11 aa, Homo Sapien
IALYETPTGWK

SEQ ID NO: 1994 - protein, 13 aa, Homo Sapien
IDAMHGVVGPYVK

SEQ ID NO: 1995 - protein, 18 aa, Homo Sapien
INQDPQVMLAPLISIALK

SEQ ID NO: 1996 - protein, 8 aa, Homo Sapien
LYIDSYEK

SEQ ID NO: 1997 - protein, 8 aa, Homo Sapien
VDLGVLGK

SEQ ID NO: 1998 - protein, 13 aa, Homo Sapien
YDYEEVEAEGANK

SEQ ID NO: 1999 - protein, 14 aa, Homo Sapien
AHQVVEDGYEFFAK

SEQ ID NO: 2000 - protein, 17 aa, Homo Sapien
EIFLSQPILLELEAPLK

SEQ ID NO: 2001 - protein, 17 aa, Homo Sapien
EIPDEISILLLGVAHFK

SEQ ID NO: 2002 - protein, 10 aa, Homo Sapien
TVQAVLTVPK

SEQ ID NO: 2003 - protein, 13 aa, Homo Sapien
AKPAEAPAAAAPK

SEQ ID NO: 2004 - protein, 21 aa, Homo Sapien
ASAFALQEQPVVNAVIDDTTK

SEQ ID NO: 2005 - protein, 7 aa, Homo Sapien
DDLVTVK

SEQ ID NO: 2006 - protein, 9 aa, Homo Sapien
LGFMSAFVK

SEQ ID NO: 2007 - protein, 18 aa, Homo Sapien
YGINTTDIFQTVDLWEGK

SEQ ID NO: 2008 - protein, 11 aa, Homo Sapien
LLGELLQDNAK

SEQ ID NO: 2009 - protein, 8 aa, Homo Sapien
LVPVLSAK

SEQ ID NO: 2010 - protein, 16 aa, Homo Sapien
IEVIKPGDLGVDLTSK

SEQ ID NO: 2011 - protein, 10 aa, Homo Sapien
EKVDLVLLGK

SEQ ID NO: 2012 - protein, 12 aa, Homo Sapien
QAASSLQQASLK

SEQ ID NO: 2013 - protein, 14 aa, Homo Sapien
QAVTNPNNTFYATK

SEQ ID NO: 2014 - protein, 10 aa, Homo Sapien
GGAGVGSMTK

SEQ ID NO: 2015 - protein, 10 aa, Homo Sapien
IAGQVAAANK

SEQ ID NO: 2016 - protein, 13 aa, Homo Sapien
GGVLFAITDAFQK

SEQ ID NO: 2017 - protein, 17 aa, Homo Sapien
TADTAVTGLASPLSTGK

SEQ ID NO: 2018 - protein, 32 aa, Homo Sapien
GSNMFNHLSAVSESIPALGWIAVSPKPGPYVK

SEQ ID NO: 2019 - protein, 27 aa, Homo Sapien
AFLLMASQYQQPHENDVAALLKPISEK

SEQ ID NO: 2020 - protein, 11 aa, Homo Sapien
EHHTTGLTWSK

SEQ ID NO: 2021 - protein, 11 aa, Homo Sapien
HAPVLELEGKK

SEQ ID NO: 2022 - protein, 8 aa, Homo Sapien
VPTISINK

SEQ ID NO: 2023 - protein, 9 aa, Homo Sapien
ALQFLEEVK

SEQ ID NO: 2024 - protein, 21 aa, Homo Sapien
DGNVLLHEMQIQHPTASLIAK

SEQ ID NO: 2025 - protein, 10 aa, Homo Sapien
IITEGFEAAK

SEQ ID NO: 2026 - protein, 10 aa, Homo Sapien
MLVSGAGDIK

SEQ ID NO: 2027 - protein, 16 aa, Homo Sapien
VLAQNSGFDLQETLVK

SEQ ID NO: 2028 - protein, 13 aa, Homo Sapien
DVIATDKEDVAFK

SEQ ID NO: 2029 - protein, 16 aa, Homo Sapien
ELTEEKESAFEFLSSA

SEQ ID NO: 2030 - protein, 8 aa, Homo Sapien
EKMDLTAK

SEQ ID NO: 2031 - protein, 11 aa, Homo Sapien
SQGAALDKYAK

SEQ ID NO: 2032 - protein, 24 aa, Homo Sapien
GVISDGNSYGVPDDLLYSFPVVIK

SEQ ID NO: 2033 - protein, 13 aa, Homo Sapien
HSSTQYPDVNHAK

SEQ ID NO: 2034 - protein, 9 aa, Homo Sapien
LGVTANDVK

SEQ ID NO: 2035 - protein, 9 aa, Homo Sapien
LSSAMSAAK

SEQ ID NO: 2036 - protein, 17 aa, Homo Sapien
SYGVPDDLLYSFPVVIK

SEQ ID NO: 2037 - protein, 26 aa, Homo Sapien
VLVTGAAGQIAYSLLYSIGNGSVFGK

SEQ ID NO: 2038 - protein, 15 aa, Homo Sapien
EVGVYEALKDDSWLK

SEQ ID NO: 2039 - protein, 10 aa, Homo Sapien
KLSSAMSAAK

SEQ ID NO: 2040 - protein, 20 aa, Homo Sapien
NVIIWGNHSSTQYPDVNHAK

SEQ ID NO: 2041 - protein, 12 aa, Homo Sapien
FVFSLVDAMNGK

SEQ ID NO: 2042 - protein, 22 aa, Homo Sapien
LTLYDIAHTPGVAADLSHIETK

SEQ ID NO: 2043 - protein, 10 aa, Homo Sapien
MISDAIPELK

SEQ ID NO: 2044 - protein, 21 aa, Homo Sapien
AKVAVLGASGGIGQPLSLLLK

SEQ ID NO: 2045 - protein, 9 aa, Homo Sapien
ANTFVAELK

SEQ ID NO: 2046 - protein, 10 aa, Homo Sapien
IQEAGTEVVK

SEQ ID NO: 2047 - protein, 19 aa, Homo Sapien
VAVLGASGGIGQPLSLLLK

SEQ ID NO: 2048 - protein, 12 aa, Homo Sapien
VNVPVIGGHAGK

SEQ ID NO: 2049 - protein, 12 aa, Homo Sapien
DTSASAVAVGLK

SEQ ID NO: 2050 - protein, 8 aa, Homo Sapien
FGELVMTK

SEQ ID NO: 2051 - protein, 15 aa, Homo Sapien
FGGGNPELLTQMVSK

SEQ ID NO: 2052 - protein, 9 aa, Homo Sapien
FVDLYGAQK

SEQ ID NO: 2053 - protein, 10 aa, Homo Sapien
GFYIYQEGVK

SEQ ID NO: 2054 - protein, 8 aa, Homo Sapien
THINYGVK

SEQ ID NO: 2055 - protein, 9 aa, Homo Sapien
ILQEGVDPK

SEQ ID NO: 2056 - protein, 12 aa, Homo Sapien
VIGMHYFSPVDK

SEQ ID NO: 2057 - protein, 6 aa, Homo Sapien
YPAPLK

SEQ ID NO: 2058 - protein, 10 aa, Homo Sapien
QDLTTLDVTK

SEQ ID NO: 2059 - protein, 25 aa, Homo Sapien
IVSLFAEHNDLQYAAPGGLIGVGTK

SEQ ID NO: 2060 - protein, 13 aa, Homo Sapien
APLKPYPVSPSDK

SEQ ID NO: 2061 - protein, 9 aa, Homo Sapien
WIDFDNDYK

SEQ ID NO: 2062 - protein, 13 aa, Homo Sapien
DADVQNFVSFISK

SEQ ID NO: 2063 - protein, 12 aa, Homo Sapien
SYVSEKDVTSAK

SEQ ID NO: 2064 - protein, 13 aa, Homo Sapien
AGYPQYVSEILEK

SEQ ID NO: 2065 - protein, 9 aa, Homo Sapien
LQDAINILK

SEQ ID NO: 2066 - protein, 13 aa, Homo Sapien
MVFINNIALAQIK

SEQ ID NO: 2067 - protein, 13 aa, Homo Sapien
NLLESYHVPELIK

SEQ ID NO: 2068 - protein, 17 aa, Homo Sapien
TVQLTSSELESTLETLK

SEQ ID NO: 2069 - protein, 9 aa, Homo Sapien
FSPTDFLAK

SEQ ID NO: 2070 - protein, 8 aa, Homo Sapien
VYLQNEYK

SEQ ID NO: 2071 - protein, 18 aa, Homo Sapien
AANDAGYFNDEMAPIEVK

SEQ ID NO: 2072 - protein, 28 aa, Homo Sapien
DGTVTAGNASGVADGAGAVIIASEDAVK

SEQ ID NO: 2073 - protein, 29 aa, Homo Sapien
DGTVTAGNASGVADGAGAVIIASEDAVKK

SEQ ID NO: 2074 - protein, 11 aa, Homo Sapien
TPFGAYGGLLK

SEQ ID NO: 2075 - protein, 12 aa, Homo Sapien
KTENWLSEWWLK

SEQ ID NO: 2076 - protein, 12 aa, Homo Sapien
AMDDSSVTEHQK

SEQ ID NO: 2077 - protein, 8 aa, Homo Sapien
FNITPEIK

SEQ ID NO: 2078 - protein, 9 aa, Homo Sapien
QDTVSNFSK

SEQ ID NO: 2079 - protein, 15 aa, Homo Sapien
QPVVIYSSPGVMLPK

SEQ ID NO: 2080 - protein, 16 aa, Homo Sapien
VMIDNETLPVEYLGGK

SEQ ID NO: 2081 - protein, 15 aa, Homo Sapien
ALQPIVSEEEWAHTK

SEQ ID NO: 2082 - protein, 9 aa, Homo Sapien
LIEGVLDFK

SEQ ID NO: 2083 - protein, 19 aa, Homo Sapien
VIHLSNLPHSGYSDSAVLK

SEQ ID NO: 2084 - protein, 15 aa, Homo Sapien
YLLETSGNLDGLEYK

SEQ ID NO: 2085 - protein, 12 aa, Homo Sapien
GTDTVAGLALIK

SEQ ID NO: 2086 - protein, 20 aa, Homo Sapien
VIQGDGVDINTLQEIVEGMK

SEQ ID NO: 2087 - protein, 14 aa, Homo Sapien
EAVELPLTHFELYK

SEQ ID NO: 2088 - protein, 13 aa, Homo Sapien
ELLKPNASVALHK

SEQ ID NO: 2089 - protein, 18 aa, Homo Sapien
ENAPAIIFIDEIDAIATK

SEQ ID NO: 2090 - protein, 19 aa, Homo Sapien
ELWETLHQLEIDKFEFGEK

SEQ ID NO: 2091 - protein, 16 aa, Homo Sapien
ETLHQLEIDKFEFGEK

SEQ ID NO: 2092 - protein, 12 aa, Homo Sapien
KPLNIDHLGEDK

SEQ ID NO: 2093 - protein, 13 aa, Homo Sapien
ELWETLHQLEIDK

SEQ ID NO: 2094 - protein, 16 aa, Homo Sapien
KALSSMGANYSSYLAK

SEQ ID NO: 2095 - protein, 14 aa, Homo Sapien
IPEGEKVDFDDIQK

SEQ ID NO: 2096 - protein, 15 aa, Homo Sapien
ALSSMGANYSSYLAK

SEQ ID NO: 2097 - protein, 7 aa, Homo Sapien
YSSYLAK

SEQ ID NO: 2098 - protein, 14 aa, Homo Sapien
LTFDTTFSPNTGKK

SEQ ID NO: 2099 - protein, 13 aa, Homo Sapien
LTFDTTFSPNTGK

SEQ ID NO: 2100 - protein, 10 aa, Homo Sapien
LTLSALVDGK

SEQ ID NO: 2101 - protein, 23 aa, Homo Sapien
TGDFQLHTNVNDGTEFGGSIYQK

SEQ ID NO: 2102 - protein, 12 aa, Homo Sapien
YQLDPTASISAK

SEQ ID NO: 2103 - protein, 15 aa, Homo Sapien
SAADSISESVPVGPK

SEQ ID NO: 2104 - protein, 19 aa, Homo Sapien
IFQNAPTDPTQDFSTQVAK

SEQ ID NO: 2105 - protein, 9 aa, Homo Sapien
DQSGEVDFK

SEQ ID NO: 2106 - protein, 9 aa, Homo Sapien
EALEAVLIK

SEQ ID NO: 2107 - protein, 20 aa, Homo Sapien
GDKTNQGISELNASSVGMAK

SEQ ID NO: 2108 - protein, 9 aa, Homo Sapien
QVDKVESFK

SEQ ID NO: 2109 - protein, 15 aa, Homo Sapien
AALEALDELDLFGVK

SEQ ID NO: 2110 - protein, 10 aa, Homo Sapien
AYELEQSVVK

SEQ ID NO: 2111 - protein, 14 aa, Homo Sapien
IVHIANDLFLQEQK

SEQ ID NO: 2112 - protein, 11 aa, Homo Sapien
TLGADDTMLAK

SEQ ID NO: 2113 - protein, 17 aa, Homo Sapien
TNQGISELNASSVGMAK

SEQ ID NO: 2114 - protein, 11 aa, Homo Sapien
AENSSLNLIGK

SEQ ID NO: 2115 - protein, 14 aa, Homo Sapien
GAVDGGLSIPHSTK

SEQ ID NO: 2116 - protein, 11 aa, Homo Sapien
VKPWNYTYDPK

SEQ ID NO: 2117 - protein, 18 aa, Homo Sapien
WEQGQADYMGADSFDNIK

SEQ ID NO: 2118 - protein, 10 aa, Homo Sapien
GALVLGSSLK

SEQ ID NO: 2119 - protein, 15 aa, Homo Sapien
FTITPSTTQVVGILK

SEQ ID NO: 2120 - protein, 16 aa, Homo Sapien
DIQDSLTVSNEVQTAK

SEQ ID NO: 2121 - protein, 19 aa, Homo Sapien
EGAAHAFAQYNLDQFTPVK

SEQ ID NO: 2122 - protein, 8 aa, Homo Sapien
LVEDMENK

SEQ ID NO: 2123 - protein, 10 aa, Homo Sapien
STLNEIYFGK

SEQ ID NO: 2124 - protein, 12 aa, Homo Sapien
TDFKEEPEPGFK

SEQ ID NO: 2125 - protein, 10 aa, Homo Sapien
AINFNFGYAK

SEQ ID NO: 2126 - protein, 16 aa, Homo Sapien
EAATQAQQTLGSTIDK

SEQ ID NO: 2127 - protein, 15 aa, Homo Sapien
SLDIQVPNFPADETK

SEQ ID NO: 2128 - protein, 15 aa, Homo Sapien
TPGYVVTPHTMNLLK

SEQ ID NO: 2129 - protein, 12 aa, Homo Sapien
FDDTNPEKEEAK

SEQ ID NO: 2130 - protein, 14 aa, Homo Sapien
NEVDMQVLHLLGPK

SEQ ID NO: 2131 - protein, 8 aa, Homo Sapien
LEVLDSTK

SEQ ID NO: 2132 - protein, 21 aa, Homo Sapien
NAVTQFVSSMSASADVLALAK

SEQ ID NO: 2133 - protein, 8 aa, Homo Sapien
LSDIPEGK

SEQ ID NO: 2134 - protein, 9 aa, Homo Sapien
QNKLEQVEK

SEQ ID NO: 2135 - protein, 11 aa, Homo Sapien
VAASVLNPYVK

SEQ ID NO: 2136 - protein, 11 aa, Homo Sapien
YATALYSAASK

SEQ ID NO: 2137 - protein, 16 aa, Homo Sapien
GHIASVLNAWPEDVIK

SEQ ID NO: 2138 - protein, 11 aa, Homo Sapien
TATVYPEPQNK

SEQ ID NO: 2139 - protein, 11 aa, Homo Sapien
LFTAESLIGLK

SEQ ID NO: 2140 - protein, 12 aa, Homo Sapien
HKLDVTSVEDYK

SEQ ID NO: 2141 - protein, 8 aa, Homo Sapien
FSELTAEK

SEQ ID NO: 2142 - protein, 11 aa, Homo Sapien
FKDIFQEIFDK

SEQ ID NO: 2143 - protein, 13 aa, Homo Sapien
EKLILPHVDIQLK

SEQ ID NO: 2144 - protein, 17 aa, Homo Sapien
DQTDDQVTIDSALATQK

SEQ ID NO: 2145 - protein, 7 aa, Homo Sapien
FAQMLEK

SEQ ID NO: 2146 - protein, 11 aa, Homo Sapien
LILPHVDIQLK

SEQ ID NO: 2147 - protein, 8 aa, Homo Sapien
WPLYMSTK

SEQ ID NO: 2148 - protein, 11 aa, Homo Sapien
LIDDMVAQVLK

SEQ ID NO: 2149 - protein, 16 aa, Homo Sapien
LNEHFLNTTDFLDTIK

SEQ ID NO: 2150 - protein, 11 aa, Homo Sapien
TSKELEDMNQK

SEQ ID NO: 2151 - protein, 8 aa, Homo Sapien
ELEDMNQK

SEQ ID NO: 2152 - protein, 8 aa, Homo Sapien
MSADAMLK

SEQ ID NO: 2153 - protein, 13 aa, Homo Sapien
SVMLQIAATELEK

SEQ ID NO: 2154 - protein, 12 aa, Homo Sapien
GIKPVTLELGGK

SEQ ID NO: 2155 - protein, 10 aa, Homo Sapien
EVNLAVQNAK

SEQ ID NO: 2156 - protein, 12 aa, Homo Sapien
VSFTGSVPTGMK

SEQ ID NO: 2157 - protein, 11 aa, Homo Sapien
IVLLDSSLEYK

SEQ ID NO: 2158 - protein, 11 aa, Homo Sapien
ELGIWEPLAVK

SEQ ID NO: 2159 - protein, 17 aa, Homo Sapien
DKPHVNVGTIGHVDHGK

SEQ ID NO: 2160 - protein, 13 aa, Homo Sapien
QIGVEHVVVYVNK

SEQ ID NO: 2161 - protein, 11 aa, Homo Sapien
TVVTGIEMFHK

SEQ ID NO: 2162 - protein, 14 aa, Homo Sapien
GAPTTSLISVAVTK

SEQ ID NO: 2163 - protein, 13 aa, Homo Sapien
QASVADYEETVKK

SEQ ID NO: 2164 - protein, 10 aa, Homo Sapien
QGLSSSIFTK

SEQ ID NO: 2165 - protein, 15 aa, Homo Sapien
ASEWVQQVSGLMDGK

SEQ ID NO: 2166 - protein, 12 aa, Homo Sapien
DIINEEEVQFLK

SEQ ID NO: 2167 - protein, 11 aa, Homo Sapien
IVAVTGAEAQK

SEQ ID NO: 2168 - protein, 9 aa, Homo Sapien
SVLGEADQK

SEQ ID NO: 2169 - protein, 12 aa, Homo Sapien
FKDPGLVDQLVK

SEQ ID NO: 2170 - protein, 11 aa, Homo Sapien
AGGAAQLALDK

SEQ ID NO: 2171 - protein, 12 aa, Homo Sapien
ALEQFATVVEAK

SEQ ID NO: 2172 - protein, 10 aa, Homo Sapien
ELSGLGSALK

SEQ ID NO: 2173 - protein, 10 aa, Homo Sapien
FFEEVNDPAK

SEQ ID NO: 2174 - protein, 12 aa, Homo Sapien
GFGGITHGPPEK

SEQ ID NO: 2175 - protein, 13 aa, Homo Sapien
GFGGITHGPPEKK

SEQ ID NO: 2176 - protein, 9 aa, Homo Sapien
IFGSEAAWK

SEQ ID NO: 2177 - protein, 10 aa, Homo Sapien
IHNFGLIQEK

SEQ ID NO: 2178 - protein, 15 aa, Homo Sapien
NPFGNAGLLLGEAGK

SEQ ID NO: 2179 - protein, 12 aa, Homo Sapien
TPVTDPATGAVK

SEQ ID NO: 2180 - protein, 15 aa, Homo Sapien
VPSENVLGEVGSGFK

SEQ ID NO: 2181 - protein, 25 aa, Homo Sapien
KHISQISVAEDDDESLLGHLMIVGK

SEQ ID NO: 2182 - protein, 24 aa, Homo Sapien
HISQISVAEDDDESLLGHLMIVGK

SEQ ID NO: 2183 - protein, 9 aa, Homo Sapien
PGGDTIFGK

SEQ ID NO: 2184 - protein, 10 aa, Homo Sapien
EAYEAGLIGK

SEQ ID NO: 2185 - protein, 10 aa, Homo Sapien
GGAGFPTGLK

SEQ ID NO: 2186 - protein, 27 aa, Homo Sapien
HAGGVTGGWDNLLAVIPGGSSTPLIPK

SEQ ID NO: 2187 - protein, 12 aa, Homo Sapien
PAEIDSLWEISK

SEQ ID NO: 2188 - protein, 25 aa, Homo Sapien
TGGVQTVTLIPGDGIGPEISAAVMK

SEQ ID NO: 2189 - protein, 23 aa, Homo Sapien
ENTEGEYSGIEHVIVDGVVQSIK

SEQ ID NO: 2190 - protein, 11 aa, Homo Sapien
NVTAIQGPGGK

SEQ ID NO: 2191 - protein, 12 aa, Homo Sapien
PALELLEPIEQK

SEQ ID NO: 2192 - protein, 22 aa, Homo Sapien
IYKVPSTEAEALASSLMGLFEK

SEQ ID NO: 2193 - protein, 19 aa, Homo Sapien
VPSTEAEALASSLMGLFEK

SEQ ID NO: 2194 - protein, 18 aa, Homo Sapien
NFGPTGIGFGGLTQQVEK

SEQ ID NO: 2195 - protein, 12 aa, Homo Sapien
NLVDSYVAIINK

SEQ ID NO: 2196 - protein, 15 aa, Homo Sapien
VPVGDQPPDIEYQIK

SEQ ID NO: 2197 - protein, 19 aa, Homo Sapien
VYSPHVLNLTLIDLPGITK

SEQ ID NO: 2198 - protein, 10 aa, Homo Sapien
ELEVQHPAAK

SEQ ID NO: 2199 - protein, 11 aa, Homo Sapien
VADMALHYANK

SEQ ID NO: 2200 - protein, 10 aa, Homo Sapien
AVDDGVNTFK

SEQ ID NO: 2201 - protein, 10 aa, Homo Sapien
ETEGDVTSVK

SEQ ID NO: 2202 - protein, 14 aa, Homo Sapien
LVPGGGATEIELAK

SEQ ID NO: 2203 - protein, 19 aa, Homo Sapien
VVSQYSSLLSPMSVNAVMK

SEQ ID NO: 2204 - protein, 13 aa, Homo Sapien
DALSDLALHFLNK

SEQ ID NO: 2205 - protein, 12 aa, Homo Sapien
DMTSEQLDEILK

SEQ ID NO: 2206 - protein, 19 aa, Homo Sapien
QGAIVAVTGDGVNDSPALK

SEQ ID NO: 2207 - protein, 15 aa, Homo Sapien
GFKFDTDELNFPTEK

SEQ ID NO: 2208 - protein, 8 aa, Homo Sapien
KYQVDLSK

SEQ ID NO: 2209 - protein, 17 aa, Homo Sapien
DGPNALTPPPTTPEWVK

SEQ ID NO: 2210 - protein, 13 aa, Homo Sapien
DTAGDASESALLK

SEQ ID NO: 2211 - protein, 12 aa, Homo Sapien
EDSPQSHVLVMK

SEQ ID NO: 2212 - protein, 12 aa, Homo Sapien
FDTDELNFPTEK

SEQ ID NO: 2213 - protein, 11 aa, Homo Sapien
VAEIPFNSTNK

SEQ ID NO: 2214 - protein, 11 aa, Homo Sapien
TPVLFDIYEIK

SEQ ID NO: 2215 - protein, 15 aa, Homo Sapien
AINGPTSASGDDISK

SEQ ID NO: 2216 - protein, 13 aa, Homo Sapien
EDGMVPFVFVGTK

SEQ ID NO: 2217 - protein, 8 aa, Homo Sapien
VIQEIVDK

SEQ ID NO: 2218 - protein, 11 aa, Homo Sapien
NNIPYFETSAK

SEQ ID NO: 2219 - protein, 13 aa, Homo Sapien
DPENFPFVVLGNK

SEQ ID NO: 2220 - protein, 10 aa, Homo Sapien
DSGITYLGIK

SEQ ID NO: 2221 - protein, 20 aa, Homo Sapien
HTVTMIPGDGIGPELMLHVK

SEQ ID NO: 2222 - protein, 14 aa, Homo Sapien
FDHIFYTGNTAVGK

SEQ ID NO: 2223 - protein, 17 aa, Homo Sapien
VMQEEIFGPILPIVPVK

SEQ ID NO: 2224 - protein, 13 aa, Homo Sapien
YIAPTVLTDVDPK

SEQ ID NO: 2225 - protein, 8 aa, Homo Sapien
GIHDAFVK

SEQ ID NO: 2226 - protein, 30 aa, Homo Sapien
VSMELGGLAPFIVFDSANVDQAVAGAMASK

SEQ ID NO: 2227 - protein, 10 aa, Homo Sapien
YGIDEYLELK

SEQ ID NO: 2228 - protein, 12 aa, Homo Sapien
SVVALHNLINNK

SEQ ID NO: 2229 - protein, 11 aa, Homo Sapien
VVGVLLGSWQK

SEQ ID NO: 2230 - protein, 14 aa, Homo Sapien
KAEHQVGEDGFLLK

SEQ ID NO: 2231 - protein, 13 aa, Homo Sapien
AEHQVGEDGFLLK

SEQ ID NO: 2232 - protein, 10 aa, Homo Sapien
ATIISEQQAK

SEQ ID NO: 2233 - protein, 14 aa, Homo Sapien
ATQLLEGLVQELQK

SEQ ID NO: 2234 - protein, 11 aa, Homo Sapien
EASAVLFTITK

SEQ ID NO: 2235 - protein, 8 aa, Homo Sapien
ITDFGLSK

SEQ ID NO: 2236 - protein, 8 aa, Homo Sapien
LTDFGLSK

SEQ ID NO: 2237 - protein, 11 aa, Homo Sapien
SLEDLQLTHNK

SEQ ID NO: 2238 - protein, 10 aa, Homo Sapien
ISNIPDEYFK

SEQ ID NO: 2239 - protein, 10 aa, Homo Sapien
NNQIDHIDEK

SEQ ID NO: 2240 - protein, 17 aa, Homo Sapien
NTDTSVVVSWEESKDAK

SEQ ID NO: 2241 - protein, 14 aa, Homo Sapien
TPVTGYFVDLKEAK

SEQ ID NO: 2242 - protein, 15 aa, Homo Sapien
VNYIFNEKEIFEGPK

SEQ ID NO: 2243 - protein, 10 aa, Homo Sapien
KIALSATDLK

SEQ ID NO: 2244 - protein, 12 aa, Homo Sapien
KTLEETETYHAK

SEQ ID NO: 2245 - protein, 26 aa, Homo Sapien
AASAYDYGSSHGLTDSSLLLDDYSSK

SEQ ID NO: 2246 - protein, 15 aa, Homo Sapien
ATNHSTVVLVGDVFK

SEQ ID NO: 2247 - protein, 17 aa, Homo Sapien
DADAEIEGAPAAPLDVK

SEQ ID NO: 2248 - protein, 9 aa, Homo Sapien
EVIDGVPGK

SEQ ID NO: 2249 - protein, 10 aa, Homo Sapien
FALFDLAEGK

SEQ ID NO: 2250 - protein, 11 aa, Homo Sapien
GHEGIMYFVEK

SEQ ID NO: 2251 - protein, 8 aa, Homo Sapien
GLNEAAIK

SEQ ID NO: 2252 - protein, 8 aa, Homo Sapien
MAALESLK

SEQ ID NO: 2253 - protein, 9 aa, Homo Sapien
NGVPLSPSK

SEQ ID NO: 2254 - protein, 14 aa, Homo Sapien
NTDTSVVVSWEESK

SEQ ID NO: 2255 - protein, 14 aa, Homo Sapien
QATSALQQEETSEK

SEQ ID NO: 2256 - protein, 15 aa, Homo Sapien
QATSALQQEETSEKK

SEQ ID NO: 2257 - protein, 16 aa, Homo Sapien
TAYFTINGVSTADSGK

SEQ ID NO: 2258 - protein, 11 aa, Homo Sapien
TLEETETYHAK

SEQ ID NO: 2259 - protein, 11 aa, Homo Sapien
SHTVWEKENVK

SEQ ID NO: 2260 - protein, 20 aa, Homo Sapien
AVNAAGLSEYSQDSEAIEVK

SEQ ID NO: 2261 - protein, 9 aa, Homo Sapien
IALSATDLK

SEQ ID NO: 2262 - protein, 17 aa, Homo Sapien
LQDEDEGTYTFQLQDGK

SEQ ID NO: 2263 - protein, 13 aa, Homo Sapien
NQVPINVHANPGK

SEQ ID NO: 2264 - protein, 11 aa, Homo Sapien
NTGIIEMFMEK

SEQ ID NO: 2265 - protein, 17 aa, Homo Sapien
QPAVDGGSPILGYFIDK

SEQ ID NO: 2266 - protein, 10 aa, Homo Sapien
SELAVEILEK

SEQ ID NO: 2267 - protein, 11 aa, Homo Sapien
TPVTGYFVDLK

SEQ ID NO: 2268 - protein, 15 aa, Homo Sapien
VLGGLPDVVTIQEGK

SEQ ID NO: 2269 - protein, 8 aa, Homo Sapien
VNTELPVK

SEQ ID NO: 2270 - protein, 13 aa, Homo Sapien
VSEPVAALDPAEK

SEQ ID NO: 2271 - protein, 9 aa, Homo Sapien
YVMELFDGK

SEQ ID NO: 2272 - protein, 11 aa, Homo Sapien
AGQAVDDFIEK

SEQ ID NO: 2273 - protein, 11 aa, Homo Sapien
SPEQQLSATQK

SEQ ID NO: 2274 - protein, 19 aa, Homo Sapien
EAAWAITNATSGGSAEQIK

SEQ ID NO: 2275 - protein, 16 aa, Homo Sapien
DVKPSNVLINALGQVK

SEQ ID NO: 2276 - protein, 15 aa, Homo Sapien
AEEYEFLTPVEEAPK

SEQ ID NO: 2277 - protein, 8 aa, Homo Sapien
NILIDFTK

SEQ ID NO: 2278 - protein, 13 aa, Homo Sapien
GLGATTHPTAAVK

SEQ ID NO: 2279 - protein, 11 aa, Homo Sapien
LDESFLVSWTK

SEQ ID NO: 2280 - protein, 11 aa, Homo Sapien
STIGVDGSVYK

SEQ ID NO: 2281 - protein, 12 aa, Homo Sapien
STIGVDGSVYKK

SEQ ID NO: 2282 - protein, 15 aa, Homo Sapien
EASDPQPEEADGGLK

SEQ ID NO: 2283 - protein, 15 aa, Homo Sapien
FTITPPTAQVVGVLK

SEQ ID NO: 2284 - protein, 28 aa, Homo Sapien
ISALQSAGVVVSMSPAQLGTTIYKEFEK

SEQ ID NO: 2285 - protein, 9 aa, Homo Sapien
LVGGTTPGK

SEQ ID NO: 2286 - protein, 15 aa, Homo Sapien
QGTFHSQQALEYGTK

SEQ ID NO: 2287 - protein, 11 aa, Homo Sapien
HLGLPVFNTVK

SEQ ID NO: 2288 - protein, 10 aa, Homo Sapien
IGIMPGHIHK

SEQ ID NO: 2289 - protein, 11 aa, Homo Sapien
IGIMPGHIHKK

SEQ ID NO: 2290 - protein, 24 aa, Homo Sapien
ISALQSAGVVVSMSPAQLGTTIYK

SEQ ID NO: 2291 - protein, 12 aa, Homo Sapien
MGHAGAIIAGGK

SEQ ID NO: 2292 - protein, 18 aa, Homo Sapien
NVTVQPDDPISFMQLTAK

SEQ ID NO: 2293 - protein, 11 aa, Homo Sapien
QELILSNSEDK

SEQ ID NO: 2294 - protein, 19 aa, Homo Sapien
DFASILTNASPLAVNLLEK

SEQ ID NO: 2295 - protein, 10 aa, Homo Sapien
EPFPSAVTIK

SEQ ID NO: 2296 - protein, 14 aa, Homo Sapien
TASGVNQLVDIYEK

SEQ ID NO: 2297 - protein, 15 aa, Homo Sapien
SWVDKMQEDLVTLAK

SEQ ID NO: 2298 - protein, 9 aa, Homo Sapien
AVEIYIQGK

SEQ ID NO: 2299 - protein, 10 aa, Homo Sapien
MQEDLVTLAK

SEQ ID NO: 2300 - protein, 14 aa, Homo Sapien
SGPGAYESGIMVSK

SEQ ID NO: 2301 - protein, 17 aa, Homo Sapien
HGEKIPDMAPPQQAKPK

SEQ ID NO: 2302 - protein, 11 aa, Homo Sapien
FKIETVGDHSK

SEQ ID NO: 2303 - protein, 13 aa, Homo Sapien
IPDMAPPQQAKPK

SEQ ID NO: 2304 - protein, 18 aa, Homo Sapien
AVNAVGMSENSQESDVIK

SEQ ID NO: 2305 - protein, 9 aa, Homo Sapien
DPLMYFIEK

SEQ ID NO: 2306 - protein, 14 aa, Homo Sapien
FSGGSPILGYYLDK

SEQ ID NO: 2307 - protein, 12 aa, Homo Sapien
GQDVSILEIAGK

SEQ ID NO: 2308 - protein, 20 aa, Homo Sapien
IAAVNLAGIGEPSDPSEHFK

SEQ ID NO: 2309 - protein, 15 aa, Homo Sapien
LIGGLPDVVTIMEGK

SEQ ID NO: 2310 - protein, 14 aa, Homo Sapien
NDQDIQLSEHFSVK

SEQ ID NO: 2311 - protein, 9 aa, Homo Sapien
PDPEVIWFK

SEQ ID NO: 2312 - protein, 20 aa, Homo Sapien
SLDLSGQAFDEAFAEFQQFK

SEQ ID NO: 2313 - protein, 13 aa, Homo Sapien
SQSSLVLIGDAFK

SEQ ID NO: 2314 - protein, 10 aa, Homo Sapien
THFDVQFLEK

SEQ ID NO: 2315 - protein, 10 aa, Homo Sapien
YAIQQMMEDK

SEQ ID NO: 2316 - protein, 10 aa, Homo Sapien
YAVFDLMEGK

SEQ ID NO: 2317 - protein, 12 aa, Homo Sapien
YQSLVAAYGEAK

SEQ ID NO: 2318 - protein, 11 aa, Homo Sapien
GKDPLMYFIEK

SEQ ID NO: 2319 - protein, 16 aa, Homo Sapien
LMALSNEIKNPTIPLK

SEQ ID NO: 2320 - protein, 17 aa, Homo Sapien
NPTIPLKSELAYEIFDK

SEQ ID NO: 2321 - protein, 8 aa, Homo Sapien
EGETVTLK

SEQ ID NO: 2322 - protein, 9 aa, Homo Sapien
IDVTVSVYK

SEQ ID NO: 2323 - protein, 9 aa, Homo Sapien
LMALSNEIK

SEQ ID NO: 2324 - protein, 12 aa, Homo Sapien
QSSLVLIGDAFK

SEQ ID NO: 2325 - protein, 10 aa, Homo Sapien
SELAYEIFDK

SEQ ID NO: 2326 - protein, 9 aa, Homo Sapien
YTFEIFDGK

SEQ ID NO: 2327 - protein, 20 aa, Homo Sapien
QVEPLDPPAGSAPGEHVFVK

SEQ ID NO: 2328 - protein, 11 aa, Homo Sapien
LASAAYPDPSK

SEQ ID NO: 2329 - protein, 10 aa, Homo Sapien
NLQEVLGEEK

SEQ ID NO: 2330 - protein, 9 aa, Homo Sapien
NSVEVALNK

SEQ ID NO: 2331 - protein, 12 aa, Homo Sapien
TVVSGLVQFVPK

SEQ ID NO: 2332 - protein, 13 aa, Homo Sapien
GGTLKDDDWGNIK

SEQ ID NO: 2333 - protein, 24 aa, Homo Sapien
LEAIEDDSVKETDSSSASAATPSK

SEQ ID NO: 2334 - protein, 18 aa, Homo Sapien
EKFEGVELNTDEPPMVFK

SEQ ID NO: 2335 - protein, 12 aa, Homo Sapien
SSSSGHYVSWVK

SEQ ID NO: 2336 - protein, 11 aa, Homo Sapien
LVVVDENDVVK

SEQ ID NO: 2337 - protein, 19 aa, Homo Sapien
GIVSLSDILQALVLTGGEK

SEQ ID NO: 2338 - protein, 18 aa, Homo Sapien
LPVIDPESGNTLYILTHK

SEQ ID NO: 2339 - protein, 16 aa, Homo Sapien
DLKPENVLLDAHMNAK

SEQ ID NO: 2340 - protein, 17 aa, Homo Sapien
IGHYVLGDTLGVGTFGK

SEQ ID NO: 2341 - protein, 12 aa, Homo Sapien
KFEDATVQSDMK

SEQ ID NO: 2342 - protein, 11 aa, Homo Sapien
NALESYTYNIK

SEQ ID NO: 2343 - protein, 15 aa, Homo Sapien
NQVAMNPTNTIFDAK

SEQ ID NO: 2344 - protein, 12 aa, Homo Sapien
ILNDDTALKEYK

SEQ ID NO: 2345 - protein, 11 aa, Homo Sapien
NFVVVMVTKPK

SEQ ID NO: 2346 - protein, 13 aa, Homo Sapien
APSVPAAEPEYPK

SEQ ID NO: 2347 - protein, 25 aa, Homo Sapien
GIHSAIDASQTPDVVFASILAAFSK

SEQ ID NO: 2348 - protein, 25 aa, Homo Sapien
AAAASAAEAGIATTGTEDSDDALLK

SEQ ID NO: 2349 - protein, 12 aa, Homo Sapien
NAMGSLASQATK

SEQ ID NO: 2350 - protein, 22 aa, Homo Sapien
GSNTIASAAADKIPGLLGVFQK

SEQ ID NO: 2351 - protein, 9 aa, Homo Sapien
SNELWTEIK

SEQ ID NO: 2352 - protein, 15 aa, Homo Sapien
HKDAAIYLVTSLASK

SEQ ID NO: 2353 - protein, 16 aa, Homo Sapien
ANIVHLMLSSPEQIQK

SEQ ID NO: 2354 - protein, 17 aa, Homo Sapien
LLQTDDEEEAGLLELLK

SEQ ID NO: 2355 - protein, 9 aa, Homo Sapien
DVDLEFLAK

SEQ ID NO: 2356 - protein, 18 aa, Homo Sapien
ELQELVQYPVEHPDKFLK

SEQ ID NO: 2357 - protein, 15 aa, Homo Sapien
ELQELVQYPVEHPDK

SEQ ID NO: 2358 - protein, 10 aa, Homo Sapien
GDDLSTAILK

SEQ ID NO: 2359 - protein, 12 aa, Homo Sapien
GILLYGPPGTGK

SEQ ID NO: 2360 - protein, 12 aa, Homo Sapien
GLLLYGPPGTGK

SEQ ID NO: 2361 - protein, 13 aa, Homo Sapien
IVSQLLTLMDGLK

SEQ ID NO: 2362 - protein, 13 aa, Homo Sapien
LDQLIYIPLPDEK

SEQ ID NO: 2363 - protein, 9 aa, Homo Sapien
LEILQIHTK

SEQ ID NO: 2364 - protein, 20 aa, Homo Sapien
LIVDEAINEDNSVVSLSQPK

SEQ ID NO: 2365 - protein, 17 aa, Homo Sapien
NAPAIIFIDELDAIAPK

SEQ ID NO: 2366 - protein, 15 aa, Homo Sapien
VINQILTEMDGMSTK

SEQ ID NO: 2367 - protein, 16 aa, Homo Sapien
VINQILTEMDGMSTKK

SEQ ID NO: 2368 - protein, 34 aa, Homo Sapien
LKPAFIKPYGTVTAANSSFLTDGASAMLIMAEEK

SEQ ID NO: 2369 - protein, 15 aa, Homo Sapien
KAQDEGLLSDVVPFK

SEQ ID NO: 2370 - protein, 23 aa, Homo Sapien
DFMYVSQDPKDQLLLGPTYATPK

SEQ ID NO: 2371 - protein, 8 aa, Homo Sapien
KLMLDLNK

SEQ ID NO: 2372 - protein, 8 aa, Homo Sapien
LAMGYKPK

SEQ ID NO: 2373 - protein, 18 aa, Homo Sapien
AQDEGLLSDVVPFKVPGK

SEQ ID NO: 2374 - protein, 13 aa, Homo Sapien
DQLLLGPTYATPK

SEQ ID NO: 2375 - protein, 16 aa, Homo Sapien
EVVDYIIFGTVIQEVK

SEQ ID NO: 2376 - protein, 7 aa, Homo Sapien
LMLDLNK

SEQ ID NO: 2377 - protein, 9 aa, Homo Sapien
ALAMGYKPK

SEQ ID NO: 2378 - protein, 11 aa, Homo Sapien
EAALGAGFSDK

SEQ ID NO: 2379 - protein, 10 aa, Homo Sapien
QLDALLEALK

SEQ ID NO: 2380 - protein, 10 aa, Homo Sapien
QQTPDKPSPN

SEQ ID NO: 2381 - protein, 11 aa, Homo Sapien
DIQGSLQDIFK

SEQ ID NO: 2382 - protein, 12 aa, Homo Sapien
MLHDYIGDKDFK

SEQ ID NO: 2383 - protein, 13 aa, Homo Sapien
ILMDKPEMNVVLK

SEQ ID NO: 2384 - protein, 11 aa, Homo Sapien
AGIISTVEVLK

SEQ ID NO: 2385 - protein, 34 aa, Homo Sapien
AQELDALDNSHPIEVSVGHPSEVDEIFDAISYSK

SEQ ID NO: 2386 - protein, 11 aa, Homo Sapien
ATFDISLVVPK

SEQ ID NO: 2387 - protein, 11 aa, Homo Sapien
DYFNVPYPLPK

SEQ ID NO: 2388 - protein, 8 aa, Homo Sapien
FALEVAAK

SEQ ID NO: 2389 - protein, 12 aa, Homo Sapien
HGDGTTLDIMLK

SEQ ID NO: 2390 - protein, 10 aa, Homo Sapien
LSVEGFAVDK

SEQ ID NO: 2391 - protein, 17 aa, Homo Sapien
NAATEDLWESLENASGK

SEQ ID NO: 2392 - protein, 13 aa, Homo Sapien
VLGATLLPDLIQK

SEQ ID NO: 2393 - protein, 13 aa, Homo Sapien
KPYPDDENLVEVK

SEQ ID NO: 2394 - protein, 9 aa, Homo Sapien
ETALLIDPK

SEQ ID NO: 2395 - protein, 10 aa, Homo Sapien
IDFVGELNDK

SEQ ID NO: 2396 - protein, 9 aa, Homo Sapien
SPVYLTVLK

SEQ ID NO: 2397 - protein, 17 aa, Homo Sapien
VTLSFPSTLQTGTGTLK

SEQ ID NO: 2398 - protein, 27 aa, Homo Sapien
AGGAGVPAFYTPTGYGTLVQEGGSPIK

SEQ ID NO: 2399 - protein, 16 aa, Homo Sapien
QQEVVGFLEANKIDFK

SEQ ID NO: 2400 - protein, 18 aa, Homo Sapien
EENIIYSFLGLAPPPDSK

SEQ ID NO: 2401 - protein, 10 aa, Homo Sapien
MAQELYMEQK

SEQ ID NO: 2402 - protein, 12 aa, Homo Sapien
MVPPVQVSPLIK

SEQ ID NO: 2403 - protein, 11 aa, Homo Sapien
VPPVQVSPLIK

SEQ ID NO: 2404 - protein, 15 aa, Homo Sapien
KQSLGELIGTLNAAK

SEQ ID NO: 2405 - protein, 8 aa, Homo Sapien
FFVGGNWK

SEQ ID NO: 2406 - protein, 14 aa, Homo Sapien
QSLGELIGTLNAAK

SEQ ID NO: 2407 - protein, 11 aa, Homo Sapien
TPQQAQEVHEK

SEQ ID NO: 2408 - protein, 30 aa, Homo Sapien
ELASQPDVDGFLVGGASLKPEFVDIINAKQ

SEQ ID NO: 2409 - protein, 11 aa, Homo Sapien
VIADNVKDWSK

SEQ ID NO: 2410 - protein, 9 aa, Homo Sapien
KFFVGGNWK

SEQ ID NO: 2411 - protein, 29 aa, Homo Sapien
ELASQPDVDGFLVGGASLKPEFVDIINAK

SEQ ID NO: 2412 - protein, 13 aa, Homo Sapien
HVFGESDELIGQK

SEQ ID NO: 2413 - protein, 13 aa, Homo Sapien
LAYEPVWAIGTGK

SEQ ID NO: 2414 - protein, 13 aa, Homo Sapien
TATPQQAQEVHEK

SEQ ID NO: 2415 - protein, 16 aa, Homo Sapien
VTNGAFTGEISPGMIK

SEQ ID NO: 2416 - protein, 15 aa, Homo Sapien
VVLAYEPVWAIGTGK

SEQ ID NO: 2417 - protein, 20 aa, Homo Sapien
LGHVVMGNNAVSPYQQVIEK

SEQ ID NO: 2418 - protein, 13 aa, Homo Sapien
HLVFPLLEFLSVK

SEQ ID NO: 2419 - protein, 8 aa, Homo Sapien
TTVVAQLK

SEQ ID NO: 2420 - protein, 10 aa, Homo Sapien
YLTTAVITNK

SEQ ID NO: 2421 - protein, 18 aa, Homo Sapien
VAPEEHPVLLTEAPLNPK

SEQ ID NO: 2422 - protein, 12 aa, Homo Sapien
GFKDQIYDIFQK

SEQ ID NO: 2423 - protein, 12 aa, Homo Sapien
LLDSSTVTHLFK

SEQ ID NO: 2424 - protein, 11 aa, Homo Sapien
QKPITPETAEK

SEQ ID NO: 2425 - protein, 17 aa, Homo Sapien
NVFDEAILAALEPPEPK

SEQ ID NO: 2426 - protein, 7 aa, Homo Sapien
ANINIEK

SEQ ID NO: 2427 - protein, 13 aa, Homo Sapien
SINSILDYISTSK

SEQ ID NO: 2428 - protein, 20 aa, Homo Sapien
LKPDEGGEVPVLNVSYKPQK

SEQ ID NO: 2429 - protein, 13 aa, Homo Sapien
AIIKPQYVDQIPK

SEQ ID NO: 2430 - protein, 16 aa, Homo Sapien
NTVANSPQTLLAGMNK

SEQ ID NO: 2431 - protein, 12 aa, Homo Sapien
VAETANEEEVKK

SEQ ID NO: 2432 - protein, 12 aa, Homo Sapien
GKGGEIQPVSVK

SEQ ID NO: 2433 - protein, 14 aa, Homo Sapien
VLQATVVAVGSGSK

SEQ ID NO: 2434 - protein, 9 aa, Homo Sapien
DLAGSIIGK

SEQ ID NO: 2435 - protein, 15 aa, Homo Sapien
LLIHQSLAGGIIGVK

SEQ ID NO: 2436 - protein, 19 aa, Homo Sapien
GSYGDLGGPIITTQVTIPK

SEQ ID NO: 2437 - protein, 12 aa, Homo Sapien
IILDLISESPIK

SEQ ID NO: 2438 - protein, 9 aa, Homo Sapien
YDDMAAAMK

SEQ ID NO: 2439 - protein, 19 aa, Homo Sapien
TAFDDAIAELDTLNEDSYK

SEQ ID NO: 2440 - protein, 10 aa, Homo Sapien
YLAEVATGEK

SEQ ID NO: 2441 - protein, 12 aa, Homo Sapien
AIIIFVPVPQLK

SEQ ID NO: 2442 - protein, 17 aa, Homo Sapien
EAFSLFDKDGDGTITTK

SEQ ID NO: 2443 - protein, 9 aa, Homo Sapien
HVMTNLGEK

SEQ ID NO: 2444 - protein, 20 aa, Homo Sapien
APQETYADIGGLDNQIQEIK

SEQ ID NO: 2445 - protein, 10 aa, Homo Sapien
LLEPVLLLGK

SEQ ID NO: 2446 - protein, 12 aa, Homo Sapien
IISSIEQKEENK

SEQ ID NO: 2447 - protein, 19 aa, Homo Sapien
AAFDDAIAELDTLSEESYK

SEQ ID NO: 2448 - protein, 11 aa, Homo Sapien
EAAENSLVAYK

SEQ ID NO: 2449 - protein, 12 aa, Homo Sapien
HLIPAANTGESK

SEQ ID NO: 2450 - protein, 9 aa, Homo Sapien
YDEMVESMK

SEQ ID NO: 2451 - protein, 12 aa, Homo Sapien
LTSDDVKEQIYK

SEQ ID NO: 2452 - protein, 15 aa, Homo Sapien
GLAPDLPEDLYHLIK

SEQ ID NO: 2453 - protein, 10 aa, Homo Sapien
VLLGETGKEK

SEQ ID NO: 2454 - protein, 11 aa, Homo Sapien
EAIEGTYIDKK

SEQ ID NO: 2455 - protein, 13 aa, Homo Sapien
ADHDFVVQEDFMK

SEQ ID NO: 2456 - protein, 11 aa, Homo Sapien
HPGSFDVVHVK

SEQ ID NO: 2457 - protein, 17 aa, Homo Sapien
TDITYPAGFMDVISIDK

SEQ ID NO: 2458 - protein, 13 aa, Homo Sapien
KTVTAMDVVYALK

SEQ ID NO: 2459 - protein, 10 aa, Homo Sapien
DAVTYTEHAK

SEQ ID NO: 2460 - protein, 12 aa, Homo Sapien
TVTAMDVVYALK

SEQ ID NO: 2461 - protein, 12 aa, Homo Sapien
MGPGATAGGAEK

SEQ ID NO: 2462 - protein, 11 aa, Homo Sapien
FNVWDTAGQEK

SEQ ID NO: 2463 - protein, 8 aa, Homo Sapien
HLTGEFEK

SEQ ID NO: 2464 - protein, 10 aa, Homo Sapien
NLQYYDISAK

SEQ ID NO: 2465 - protein, 11 aa, Homo Sapien
LVLVGDGGTGK

SEQ ID NO: 2466 - protein, 9 aa, Homo Sapien
AALQELLSK

SEQ ID NO: 2467 - protein, 11 aa, Homo Sapien
LIIWDSYTTNK

SEQ ID NO: 2468 - protein, 17 aa, Homo Sapien
AGKFPSLLTHNENMVAK

SEQ ID NO: 2469 - protein, 13 aa, Homo Sapien
KYDAFLASESLIK

SEQ ID NO: 2470 - protein, 14 aa, Homo Sapien
VLEQLTGQTPVFSK

SEQ ID NO: 2471 - protein, 9 aa, Homo Sapien
YDGIILPGK

SEQ ID NO: 2472 - protein, 9 aa, Homo Sapien
VSFELFADK

SEQ ID NO: 2473 - protein, 15 aa, Homo Sapien
SIYGEKFEDENFILK

SEQ ID NO: 2474 - protein, 12 aa, Homo Sapien
VSFELFADKVPK

SEQ ID NO: 2475 - protein, 14 aa, Homo Sapien
LTPITYPQGLAMAK

SEQ ID NO: 2476 - protein, 13 aa, Homo Sapien
IQPGNPNYTLSLK

SEQ ID NO: 2477 - protein, 13 aa, Homo Sapien
NVEGQDMLYQSLK

SEQ ID NO: 2478 - protein, 15 aa, Homo Sapien
LASQANIAQVLAELK

SEQ ID NO: 2479 - protein, 12 aa, Homo Sapien
FLIPNASQAESK

SEQ ID NO: 2480 - protein, 12 aa, Homo Sapien
YLAEVAAGDDKK

SEQ ID NO: 2481 - protein, 18 aa, Homo Sapien
GIVDQSQQAYQEAFEISK

SEQ ID NO: 2482 - protein, 19 aa, Homo Sapien
TAFDEAIAELDTLSEESYK

SEQ ID NO: 2483 - protein, 20 aa, Homo Sapien
GEYNVYSTFQSHEPEFDYLK

SEQ ID NO: 2484 - protein, 12 aa, Homo Sapien
NAAQFLLSTNDK

SEQ ID NO: 2485 - protein, 14 aa, Homo Sapien
SFFSEIISSISDVK

SEQ ID NO: 2486 - protein, 8 aa, Homo Sapien
IVEMSTSK

SEQ ID NO: 2487 - protein, 12 aa, Homo Sapien
VHLVGIDIFTGK

SEQ ID NO: 2488 - protein, 16 aa, Homo Sapien
MFDKNADGYIDLDELK

SEQ ID NO: 2489 - protein, 15 aa, Homo Sapien
AAVEQLTEEQKNEFK

SEQ ID NO: 2490 - protein, 11 aa, Homo Sapien
AAVEQLTEEQK

SEQ ID NO: 2491 - protein, 11 aa, Homo Sapien
IDYDEFLEFMK

SEQ ID NO: 2492 - protein, 20 aa, Homo Sapien
IMLQATGETITEDDIEELMK

SEQ ID NO: 2493 - protein, 19 aa, Homo Sapien
GAEAANVTGPGGVPVQGSK

SEQ ID NO: 2494 - protein, 25 aa, Homo Sapien
NIQVDEANLLTWQGLIVPDNPPYDK

SEQ ID NO: 2495 - protein, 24 aa, Homo Sapien
VETGVLKPGMVVTFAPVNVTTEVK

SEQ ID NO: 2496 - protein, 13 aa, Homo Sapien
EMATAASSSSLEK

SEQ ID NO: 2497 - protein, 12 aa, Homo Sapien
KDSYVGDEAQSK

SEQ ID NO: 2498 - protein, 12 aa, Homo Sapien
INVYYNEATGGK

SEQ ID NO: 2499 - protein, 15 aa, Homo Sapien
ALTVPELTQQMFDAK

SEQ ID NO: 2500 - protein, 17 aa, Homo Sapien
MSATFIGNSTAIQELFK

SEQ ID NO: 2501 - protein, 7 aa, Homo Sapien
EIAQDFK

SEQ ID NO: 2502 - protein, 12 aa, Homo Sapien
EFTPPVQAAYQK

SEQ ID NO: 2503 - protein, 19 aa, Homo Sapien
FFESFGDLSTPDAVMGNPK

SEQ ID NO: 2504 - protein, 9 aa, Homo Sapien
SAVTALWGK

SEQ ID NO: 2505 - protein, 11 aa, Homo Sapien
IQSTVTQPGGK

SEQ ID NO: 2506 - protein, 11 aa, Homo Sapien
VLSPADKTNVK

SEQ ID NO: 2507 - protein, 30 aa, Homo Sapien
KVADALTNAVAHVDDMPNALSALSDLHAHK

SEQ ID NO: 2508 - protein, 25 aa, Homo Sapien
LTNAVAHVDDMPNALSALSDLHAHK

SEQ ID NO: 2509 - protein, 9 aa, Homo Sapien
MFLSFPTTK

SEQ ID NO: 2510 - protein, 16 aa, Homo Sapien
TYFPHFDLSHGSAQVK

SEQ ID NO: 2511 - protein, 29 aa, Homo Sapien
VADALTNAVAHVDDMPNALSALSDLHAHK

SEQ ID NO: 2512 - protein, 12 aa, Homo Sapien
FLASVSTVLTSK

SEQ ID NO: 2513 - protein, 14 aa, Homo Sapien
ILIANTGMDTDKIK

SEQ ID NO: 2514 - protein, 19 aa, Homo Sapien
LGGSLADSYLDEGFLLDKK

SEQ ID NO: 2515 - protein, 9 aa, Homo Sapien
HEVININLK

SEQ ID NO: 2516 - protein, 13 aa, Homo Sapien
LGLPGDEVDNKVK

SEQ ID NO: 2517 - protein, 15 aa, Homo Sapien
FGNAMLYGYQVGLFK

SEQ ID NO: 2518 - protein, 15 aa, Homo Sapien
WAGGGFLSTVGDLLK

SEQ ID NO: 2519 - protein, 20 aa, Homo Sapien
LDVEFKPLAPDGVLLFSGGK

SEQ ID NO: 2520 - protein, 16 aa, Homo Sapien
EVSEAVVDTLESEYLK

SEQ ID NO: 2521 - protein, 18 aa, Homo Sapien
FLVHDSFWALPEQFLGNK

SEQ ID NO: 2522 - protein, 23 aa, Homo Sapien
FQGLDLNEELYLGGYPDYGAIPK

SEQ ID NO: 2523 - protein, 13 aa, Homo Sapien
IPGDQVVSVVFIK

SEQ ID NO: 2524 - protein, 22 aa, Homo Sapien
SPVISIDPPSSTVQQGQDASFK

SEQ ID NO: 2525 - protein, 19 aa, Homo Sapien
VVPYFTQTPYSFLPLPTIK

SEQ ID NO: 2526 - protein, 15 aa, Homo Sapien
KTGQAPGYSYTAANK

SEQ ID NO: 2527 - protein, 18 aa, Homo Sapien
GIIWGEDTLMEYLENPKK

SEQ ID NO: 2528 - protein, 14 aa, Homo Sapien
TGQAPGYSYTAANK

SEQ ID NO: 2529 - protein, 8 aa, Homo Sapien
ADLIAYLK

SEQ ID NO: 2530 - protein, 23 aa, Homo Sapien
VILPVSVDEYQVGQLYSVAEASK

SEQ ID NO: 2531 - protein, 8 aa, Homo Sapien
FGFYEVFK

SEQ ID NO: 2532 - protein, 9 aa, Homo Sapien
GSSASLVLK

SEQ ID NO: 2533 - protein, 11 aa, Homo Sapien
LGQALTEVYAK

SEQ ID NO: 2534 - protein, 10 aa, Homo Sapien
DAMQYASESK

SEQ ID NO: 2535 - protein, 17 aa, Homo Sapien
KVSQPIEGHAASFAQFK

SEQ ID NO: 2536 - protein, 12 aa, Homo Sapien
AHTMTDDVTFWK

SEQ ID NO: 2537 - protein, 12 aa, Homo Sapien
ALEHFTDLYDIK

SEQ ID NO: 2538 - protein, 14 aa, Homo Sapien
GQFSTDELVAEVEK

SEQ ID NO: 2539 - protein, 7 aa, Homo Sapien
IAAYLFK

SEQ ID NO: 2540 - protein, 18 aa, Homo Sapien
LHIIEVGTPPTGNQPFPK

SEQ ID NO: 2541 - protein, 12 aa, Homo Sapien
NLQNLLILTAIK

SEQ ID NO: 2542 - protein, 16 aa, Homo Sapien
VSQPIEGHAASFAQFK

SEQ ID NO: 2543 - protein, 14 aa, Homo Sapien
ETKSEETLDEGPPK

SEQ ID NO: 2544 - protein, 14 aa, Homo Sapien
SEETLDEGPPKYTK

SEQ ID NO: 2545 - protein, 11 aa, Homo Sapien
LEIEPEWAYGK

SEQ ID NO: 2546 - protein, 11 aa, Homo Sapien
SEETLDEGPPK

SEQ ID NO: 2547 - protein, 12 aa, Homo Sapien
YNILGTNTIMDK

SEQ ID NO: 2548 - protein, 13 aa, Homo Sapien
VKAVNAAGASEPK

SEQ ID NO: 2549 - protein, 23 aa, Homo Sapien
EAGTTPAKDWTLVETPPGEEQAK

SEQ ID NO: 2550 - protein, 19 aa, Homo Sapien
EENEVPAPAPPPEEPSKEK

SEQ ID NO: 2551 - protein, 18 aa, Homo Sapien
KEENEVPAPAPPPEEPSK

SEQ ID NO: 2552 - protein, 13 aa, Homo Sapien
TKFTITGLPTDAK

SEQ ID NO: 2553 - protein, 11 aa, Homo Sapien
KHILIIEGATK

SEQ ID NO: 2554 - protein, 15 aa, Homo Sapien
KILTPLTDQTVNLGK

SEQ ID NO: 2555 - protein, 31 aa, Homo Sapien
IHKLVIANALTEDEGDYVFAPDAYNVTLPAK

SEQ ID NO: 2556 - protein, 9 aa, Homo Sapien
LSVDLKPLK

SEQ ID NO: 2557 - protein, 8 aa, Homo Sapien
SVDLKPLK

SEQ ID NO: 2558 - protein, 7 aa, Homo Sapien
VDLKPLK

SEQ ID NO: 2559 - protein, 19 aa, Homo Sapien
ANSQLSILFIEKPQGGTVK

SEQ ID NO: 2560 - protein, 21 aa, Homo Sapien
QNANSQLSILFIEKPQGGTVK

SEQ ID NO: 2561 - protein, 17 aa, Homo Sapien
SQLSILFIEKPQGGTVK

SEQ ID NO: 2562 - protein, 18 aa, Homo Sapien
EVKQQEEEPQVDVWELLK

SEQ ID NO: 2563 - protein, 18 aa, Homo Sapien
ADAAEYSVMTTGGQSSAK

SEQ ID NO: 2564 - protein, 23 aa, Homo Sapien
ALTEDEGDYVFAPDAYNVTLPAK

SEQ ID NO: 2565 - protein, 11 aa, Homo Sapien
AVNAAGASEPK

SEQ ID NO: 2566 - protein, 14 aa, Homo Sapien
DDGNAAITGYTIQK

SEQ ID NO: 2567 - protein, 11 aa, Homo Sapien
DDSGVYHINLK

SEQ ID NO: 2568 - protein, 15 aa, Homo Sapien
DWTLVETPPGEEQAK

SEQ ID NO: 2569 - protein, 17 aa, Homo Sapien
EENEVPAPAPPPEEPSK

SEQ ID NO: 2570 - protein, 11 aa, Homo Sapien
FTITGLPTDAK

SEQ ID NO: 2571 - protein, 10 aa, Homo Sapien
HILIIEGATK

SEQ ID NO: 2572 - protein, 19 aa, Homo Sapien
IILDGLDADNTVTVIAGNK

SEQ ID NO: 2573 - protein, 14 aa, Homo Sapien
ILTPLTDQTVNLGK

SEQ ID NO: 2574 - protein, 12 aa, Homo Sapien
LEIPISGEPPPK

SEQ ID NO: 2575 - protein, 28 aa, Homo Sapien
LVIANALTEDEGDYVFAPDAYNVTLPAK

SEQ ID NO: 2576 - protein, 10 aa, Homo Sapien
NGEEIIPGPK

SEQ ID NO: 2577 - protein, 15 aa, Homo Sapien
QQEEEPQVDVWELLK

SEQ ID NO: 2578 - protein, 10 aa, Homo Sapien
VGEDITFIAK

SEQ ID NO: 2579 - protein, 8 aa, Homo Sapien
VHVIDPPK

SEQ ID NO: 2580 - protein, 13 aa, Homo Sapien
FVVELADPKLEVK

SEQ ID NO: 2581 - protein, 11 aa, Homo Sapien
SHSGKYDLQVK

SEQ ID NO: 2582 - protein, 9 aa, Homo Sapien
FVVELADPK

SEQ ID NO: 2583 - protein, 11 aa, Homo Sapien
IFAVNAIGISK

SEQ ID NO: 2584 - protein, 10 aa, Homo Sapien
ILDPAYQVDK

SEQ ID NO: 2585 - protein, 18 aa, Homo Sapien
SGEGQEDAGELDFSGLLK

SEQ ID NO: 2586 - protein, 14 aa, Homo Sapien
VGEAVNLVIPFQGK

SEQ ID NO: 2587 - protein, 10 aa, Homo Sapien
VYTFEMQIIK

SEQ ID NO: 2588 - protein, 14 aa, Homo Sapien
QLMHSGHPSEKEIK

SEQ ID NO: 2589 - protein, 16 aa, Homo Sapien
LAEISDVWEEMKTTLK

SEQ ID NO: 2590 - protein, 9 aa, Homo Sapien
KPLIIFTPK

SEQ ID NO: 2591 - protein, 31 aa, Homo Sapien
GHHVAQLDPLGILDADLDSSVPADIISSTDK

SEQ ID NO: 2592 - protein, 21 aa, Homo Sapien
GSLAAVAHAQSLVEAQPNVDK

SEQ ID NO: 2593 - protein, 16 aa, Homo Sapien
VIPEDGPAAQNPENVK

SEQ ID NO: 2594 - protein, 16 aa, Homo Sapien
QKFETPGIMQFTNEEK

SEQ ID NO: 2595 - protein, 11 aa, Homo Sapien
DPAAAPATGNK

SEQ ID NO: 2596 - protein, 14 aa, Homo Sapien
FETPGIMQFTNEEK

SEQ ID NO: 2597 - protein, 18 aa, Homo Sapien
NGHNEMDEPMFTQPLMYK

SEQ ID NO: 2598 - protein, 22 aa, Homo Sapien
YAELLVSQGVVNQPEYEEEISK

SEQ ID NO: 2599 - protein, 19 aa, Homo Sapien
ISGVGIDQPPYGIFVINQK

SEQ ID NO: 2600 - protein, 11 aa, Homo Sapien
HLNVQIAASEK

SEQ ID NO: 2601 - protein, 8 aa, Homo Sapien
QALAQLEK

SEQ ID NO: 2602 - protein, 20 aa, Homo Sapien
TLQLVALDADTINHPAQLSK

SEQ ID NO: 2603 - protein, 11 aa, Homo Sapien
TSLAPIIVYIK

SEQ ID NO: 2604 - protein, 9 aa, Homo Sapien
MIDGKPEYK

SEQ ID NO: 2605 - protein, 16 aa, Homo Sapien
AVVVNAAQLASYSQSK

SEQ ID NO: 2606 - protein, 14 aa, Homo Sapien
LTGADGTPPGFLLK

SEQ ID NO: 2607 - protein, 9 aa, Homo Sapien
MQLSGEGAK

SEQ ID NO: 2608 - protein, 11 aa, Homo Sapien
EQGNIYKPNNK

SEQ ID NO: 2609 - protein, 9 aa, Homo Sapien
AMADELSEK

SEQ ID NO: 2610 - protein, 8 aa, Homo Sapien
HLNDDVVK

SEQ ID NO: 2611 - protein, 21 aa, Homo Sapien
IDFEDVIAEPEGTHSFDGIWK

SEQ ID NO: 2612 - protein, 13 aa, Homo Sapien
LESLSYQLSGLQK

SEQ ID NO: 2613 - protein, 11 aa, Homo Sapien
QVLEGEEIAYK

SEQ ID NO: 2614 - protein, 12 aa, Homo Sapien
ALEEANTELEVK

SEQ ID NO: 2615 - protein, 9 aa, Homo Sapien
DAEDWFFSK

SEQ ID NO: 2616 - protein, 9 aa, Homo Sapien
QFTSSSSIK

SEQ ID NO: 2617 - protein, 16 aa, Homo Sapien
FSLYFLAYEDKNDIPK

SEQ ID NO: 2618 - protein, 20 aa, Homo Sapien
GLAFIQDPDGYWIEILNPNK

SEQ ID NO: 2619 - protein, 14 aa, Homo Sapien
DLGDSHPVLYQSLK

SEQ ID NO: 2620 - protein, 13 aa, Homo Sapien
YDEIVKEVSAYIK

SEQ ID NO: 2621 - protein, 33 aa, Homo Sapien
KIGYNPATVPFVPISGWHGDNMLEPSPNMPWFK

SEQ ID NO: 2622 - protein, 32 aa, Homo Sapien
IGYNPATVPFVPISGWHGDNMLEPSPNMPWFK

SEQ ID NO: 2623 - protein, 11 aa, Homo Sapien
MDSTEPAYSEK

SEQ ID NO: 2624 - protein, 15 aa, Homo Sapien
GNVFSSPTAAGTPNK

SEQ ID NO: 2625 - protein, 12 aa, Homo Sapien
LEQYTSAIEGTK

SEQ ID NO: 2626 - protein, 14 aa, Homo Sapien
IEDGNNFGVAVQEK

SEQ ID NO: 2627 - protein, 12 aa, Homo Sapien
NAYAVLYDIILK

SEQ ID NO: 2628 - protein, 17 aa, Homo Sapien
KQGGLGPMNIPLVSDPK

SEQ ID NO: 2629 - protein, 9 aa, Homo Sapien
IGHPAPNFK

SEQ ID NO: 2630 - protein, 16 aa, Homo Sapien
QGGLGPMNIPLVSDPK

SEQ ID NO: 2631 - protein, 11 aa, Homo Sapien
ATAVMPDGQFK

SEQ ID NO: 2632 - protein, 9 aa, Homo Sapien
AIGPWIQAK

SEQ ID NO: 2633 - protein, 16 aa, Homo Sapien
ETAETDTTEQVVASFK

SEQ ID NO: 2634 - protein, 12 aa, Homo Sapien
GAIMGIQGEIQK

SEQ ID NO: 2635 - protein, 16 aa, Homo Sapien
QFAAQANAIGPWIQAK

SEQ ID NO: 2636 - protein, 17 aa, Homo Sapien
KDDPIGNLNTAFEVAEK

SEQ ID NO: 2637 - protein, 17 aa, Homo Sapien
VLAVNQENEKLMEEYEK

SEQ ID NO: 2638 - protein, 16 aa, Homo Sapien
MLDAEDIVNTPKPDEK

SEQ ID NO: 2639 - protein, 16 aa, Homo Sapien
DDPIGNLNTAFEVAEK

SEQ ID NO: 2640 - protein, 7 aa, Homo Sapien
GLEQVEK

SEQ ID NO: 2641 - protein, 17 aa, Homo Sapien
LEGDHQLLQESLVFDNK

SEQ ID NO: 2642 - protein, 7 aa, Homo Sapien
LMEEYEK

SEQ ID NO: 2643 - protein, 10 aa, Homo Sapien
LNTAFEVAEK

SEQ ID NO: 2644 - protein, 15 aa, Homo Sapien
LVSIGAEEIVDGNLK

SEQ ID NO: 2645 - protein, 12 aa, Homo Sapien
NVNVQNFHTSWK

SEQ ID NO: 2646 - protein, 10 aa, Homo Sapien
QQEQNIINYK

SEQ ID NO: 2647 - protein, 10 aa, Homo Sapien
VLAVNQENEK

SEQ ID NO: 2648 - protein, 14 aa, Homo Sapien
DAMPSDANLNSINK

SEQ ID NO: 2649 - protein, 17 aa, Homo Sapien
GLTPTGMLPSGVLSGGK

SEQ ID NO: 2650 - protein, 18 aa, Homo Sapien
QTLQSATVEAIEADEAIK

SEQ ID NO: 2651 - protein, 17 aa, Homo Sapien
VAEAHENIIHGSGATGK

SEQ ID NO: 2652 - protein, 11 aa, Homo Sapien
VFEFGGPEVLK

SEQ ID NO: 2653 - protein, 12 aa, Homo Sapien
GKKPDIDITGPK

SEQ ID NO: 2654 - protein, 11 aa, Homo Sapien
LKGDVDVSGPK

SEQ ID NO: 2655 - protein, 19 aa, Homo Sapien
FSMPGFKGEGPDVDVNLPK

SEQ ID NO: 2656 - protein, 19 aa, Homo Sapien
ISMPGFKGEGPEVDVNLPK

SEQ ID NO: 2657 - protein, 14 aa, Homo Sapien
ISIPDVDLDLKGPK

SEQ ID NO: 2658 - protein, 14 aa, Homo Sapien
ISMPDIDLNLKGPK

SEQ ID NO: 2659 - protein, 14 aa, Homo Sapien
ISMPDLDLNLKGPK

SEQ ID NO: 2660 - protein, 17 aa, Homo Sapien
SPQISMSDIDLNLKGPK

SEQ ID NO: 2661 - protein, 25 aa, Homo Sapien
ADIDVSGPSVDTDAPDLDIEGPEGK

SEQ ID NO: 2662 - protein, 12 aa, Homo Sapien
AEGPEVDVNLPK

SEQ ID NO: 2663 - protein, 12 aa, Homo Sapien
GEGPEVDVNLPK

SEQ ID NO: 2664 - protein, 9 aa, Homo Sapien
GNVDISAPK

SEQ ID NO: 2665 - protein, 14 aa, Homo Sapien
GPQVSSALNLDTSK

SEQ ID NO: 2666 - protein, 16 aa, Homo Sapien
IDVDAPDIDIHGPDAK

SEQ ID NO: 2667 - protein, 11 aa, Homo Sapien
ISMPDIDLNLK

SEQ ID NO: 2668 - protein, 11 aa, Homo Sapien
ISMPDLDLNLK

SEQ ID NO: 2669 - protein, 11 aa, Homo Sapien
ISMPDVDLHLK

SEQ ID NO: 2670 - protein, 12 aa, Homo Sapien
LPTGQISGPEIK

SEQ ID NO: 2671 - protein, 16 aa, Homo Sapien
MDAEVPDVNIEGPDAK

SEQ ID NO: 2672 - protein, 18 aa, Homo Sapien
VDIDAPDVDVHGPDWHLK

SEQ ID NO: 2673 - protein, 18 aa, Homo Sapien
VDIDVPDVGVQGPDWHLK

SEQ ID NO: 2674 - protein, 18 aa, Homo Sapien
VDIDVPDVNVQGPDWHLK

SEQ ID NO: 2675 - protein, 16 aa, Homo Sapien
VDIEAPDVSLEGPEGK

SEQ ID NO: 2676 - protein, 16 aa, Homo Sapien
VDVDIPDVNIEGPDAK

SEQ ID NO: 2677 - protein, 16 aa, Homo Sapien
VDVDVPDVNIEGPDAK

SEQ ID NO: 2678 - protein, 16 aa, Homo Sapien
VDVEVPDVSLEGPEGK

SEQ ID NO: 2679 - protein, 18 aa, Homo Sapien
VDVSAPDVEAHGPEWNLK

SEQ ID NO: 2680 - protein, 16 aa, Homo Sapien
VGVEVPDVNIEGPEGK

SEQ ID NO: 2681 - protein, 16 aa, Homo Sapien
VNVEAPDVNLEGLGGK

SEQ ID NO: 2682 - protein, 18 aa, Homo Sapien
VSVGAPDLSLEASEGSIK

SEQ ID NO: 2683 - protein, 9 aa, Homo Sapien
ADIDVSGPK

SEQ ID NO: 2684 - protein, 9 aa, Homo Sapien
ADLDVSGPK

SEQ ID NO: 2685 - protein, 16 aa, Homo Sapien
VDIDVPDVNIEGPDAK

SEQ ID NO: 2686 - protein, 16 aa, Homo Sapien
VDIDVPDVNIEGPEGK

SEQ ID NO: 2687 - protein, 13 aa, Homo Sapien
AEILLSSSKPVPK

SEQ ID NO: 2688 - protein, 13 aa, Homo Sapien
NMVVDDDSPEMYK

SEQ ID NO: 2689 - protein, 14 aa, Homo Sapien
QMVNEDEENQDTAK

SEQ ID NO: 2690 - protein, 12 aa, Homo Sapien
SVQATTENKELK

SEQ ID NO: 2691 - protein, 9 aa, Homo Sapien
SPVAVQSTK

SEQ ID NO: 2692 - protein, 21 aa, Homo Sapien
ALAFHPVEPVLVTASEDHTLK

SEQ ID NO: 2693 - protein, 13 aa, Homo Sapien
AYIASAGADALAK

SEQ ID NO: 2694 - protein, 11 aa, Homo Sapien
YGTELNQGDLK

SEQ ID NO: 2695 - protein, 23 aa, Homo Sapien
AYAPGGPAYQPVVEAFGTDILHK

SEQ ID NO: 2696 - protein, 10 aa, Homo Sapien
KEEKPEPQIK

SEQ ID NO: 2697 - protein, 12 aa, Homo Sapien
VSKDVEDVPASK

SEQ ID NO: 2698 - protein, 11 aa, Homo Sapien
SEKETAIDVEK

SEQ ID NO: 2699 - protein, 10 aa, Homo Sapien
EGTEDVSPTK

SEQ ID NO: 2700 - protein, 11 aa, Homo Sapien
PTPASPALEEK

SEQ ID NO: 2701 - protein, 19 aa, Homo Sapien
TEITAEGNASTTTTVIDSK

SEQ ID NO: 2702 - protein, 9 aa, Homo Sapien
NFSASSIAK

SEQ ID NO: 2703 - protein, 20 aa, Homo Sapien
SVIDPVPAPVGDSHVDGAAK

SEQ ID NO: 2704 - protein, 15 aa, Homo Sapien
VGQAVDVVGQAGKPK

SEQ ID NO: 2705 - protein, 23 aa, Homo Sapien
APVQPQQSPAAAPGGTDEKPSGK

SEQ ID NO: 2706 - protein, 14 aa, Homo Sapien
SSTTSMTSVPKPLK

SEQ ID NO: 2707 - protein, 15 aa, Homo Sapien
EDVLTLLLPVMGDSK

SEQ ID NO: 2708 - protein, 10 aa, Homo Sapien
EWQELDDAEK

SEQ ID NO: 2709 - protein, 13 aa, Homo Sapien
WLPLGLGLNHLGK

SEQ ID NO: 2710 - protein, 22 aa, Homo Sapien
GGPVQVLEDEELKSQPEPLVVK

SEQ ID NO: 2711 - protein, 13 aa, Homo Sapien
GGPVQVLEDEELK

SEQ ID NO: 2712 - protein, 13 aa, Homo Sapien
LTGQLFLGGSIVK

SEQ ID NO: 2713 - protein, 10 aa, Homo Sapien
NEGGTWSVEK

SEQ ID NO: 2714 - protein, 18 aa, Homo Sapien
NTGTEAPDYLATVDVDPK

SEQ ID NO: 2715 - protein, 16 aa, Homo Sapien
FMQTFVLAPEGSVANK

SEQ ID NO: 2716 - protein, 25 aa, Homo Sapien
MVEVQNQQFQINSNDGKPLFTVDEK

SEQ ID NO: 2717 - protein, 14 aa, Homo Sapien
LEGESEFLFPLYAK

SEQ ID NO: 2718 - protein, 14 aa, Homo Sapien
DLEDKEGEIQAGAK

SEQ ID NO: 2719 - protein, 14 aa, Homo Sapien
EAVAPVQEESDLEK

SEQ ID NO: 2720 - protein, 18 aa, Homo Sapien
EANSIIITPGYGLCAAKA

SEQ ID NO: 2721 - protein, 8 aa, Homo Sapien
KAPVLFNK

SEQ ID NO: 2722 - protein, 14 aa, Homo Sapien
AISPDKDNFYFDVK

SEQ ID NO: 2723 - protein, 23 aa, Homo Sapien
SLGAEPLEVDLKESGEGQGGYAK

SEQ ID NO: 2724 - protein, 17 aa, Homo Sapien
APMVNPTLGVHEADLLK

SEQ ID NO: 2725 - protein, 10 aa, Homo Sapien
AQYPIADLVK

SEQ ID NO: 2726 - protein, 10 aa, Homo Sapien
EVLASDLVVK

SEQ ID NO: 2727 - protein, 11 aa, Homo Sapien
FFTGQITAAGK

SEQ ID NO: 2728 - protein, 18 aa, Homo Sapien
ILIVGGGVAGLASAGAAK

SEQ ID NO: 2729 - protein, 15 aa, Homo Sapien
MATQASTLYSNNITK

SEQ ID NO: 2730 - protein, 7 aa, Homo Sapien
PQGAPVK

SEQ ID NO: 2731 - protein, 16 aa, Homo Sapien
QGFNVVVESGAGEASK

SEQ ID NO: 2732 - protein, 19 aa, Homo Sapien
SLANVILGGYGTTSTAGGK

SEQ ID NO: 2733 - protein, 12 aa, Homo Sapien
SLGAEPLEVDLK

SEQ ID NO: 2734 - protein, 20 aa, Homo Sapien
TSGTLISFIYPAQNPELLNK

SEQ ID NO: 2735 - protein, 9 aa, Homo Sapien
TVAELEAEK

SEQ ID NO: 2736 - protein, 10 aa, Homo Sapien
VAGAQIQGAK

SEQ ID NO: 2737 - protein, 13 aa, Homo Sapien
VALSPAGVQNLVK

SEQ ID NO: 2738 - protein, 9 aa, Homo Sapien
VIFPAPTPK

SEQ ID NO: 2739 - protein, 20 aa, Homo Sapien
VTIAQGYDALSSMANIAGYK

SEQ ID NO: 2740 - protein, 21 aa, Homo Sapien
VKDELQALLAATSTAGSQDIK

SEQ ID NO: 2741 - protein, 11 aa, Homo Sapien
ADAGGLGISIK

SEQ ID NO: 2742 - protein, 12 aa, Homo Sapien
QATHDQAVQALK

SEQ ID NO: 2743 - protein, 16 aa, Homo Sapien
QYTSPEEIDAQLQAEK

SEQ ID NO: 2744 - protein, 11 aa, Homo Sapien
KVTQLDLDGPK

SEQ ID NO: 2745 - protein, 13 aa, Homo Sapien
FTDDYQLFEELGK

SEQ ID NO: 2746 - protein, 13 aa, Homo Sapien
NLINQMLTINPAK

SEQ ID NO: 2747 - protein, 13 aa, Homo Sapien
FTDEYQLFEELGK

SEQ ID NO: 2748 - protein, 10 aa, Homo Sapien
IPTGQEYAAK

SEQ ID NO: 2749 - protein, 11 aa, Homo Sapien
ASVEDADTQSK

SEQ ID NO: 2750 - protein, 19 aa, Homo Sapien
LLGPDAAINLTDPDGALAK

SEQ ID NO: 2751 - protein, 12 aa, Homo Sapien
GTIPDMIADSGK

SEQ ID NO: 2752 - protein, 15 aa, Homo Sapien
LLQSIGQAPESISEK

SEQ ID NO: 2753 - protein, 15 aa, Homo Sapien
YPGVSNYQVEEDIGK

SEQ ID NO: 2754 - protein, 23 aa, Homo Sapien
YGAAEPHTIAAFLGGAAAQEVIK

SEQ ID NO: 2755 - protein, 16 aa, Homo Sapien
LLETHIHNQGLAAIEK

SEQ ID NO: 2756 - protein, 13 aa, Homo Sapien
GLTEQEVETILDK

SEQ ID NO: 2757 - protein, 15 aa, Homo Sapien
VLTTGYWPTQSATPK

SEQ ID NO: 2758 - protein, 9 aa, Homo Sapien
ESFETFINK

SEQ ID NO: 2759 - protein, 15 aa, Homo Sapien
GGQQALLQHWSEYIK

SEQ ID NO: 2760 - protein, 13 aa, Homo Sapien
QLLGEHLTAILQK

SEQ ID NO: 2761 - protein, 13 aa, Homo Sapien
KAIVAGDQNVEYK

SEQ ID NO: 2762 - protein, 12 aa, Homo Sapien
AIVAGDQNVEYK

SEQ ID NO: 2763 - protein, 11 aa, Homo Sapien
QVIGTGSFFPK

SEQ ID NO: 2764 - protein, 18 aa, Homo Sapien
AVPIPEASSFFIFSPTNK

SEQ ID NO: 2765 - protein, 14 aa, Homo Sapien
DWSILGPHHLDEFK

SEQ ID NO: 2766 - protein, 9 aa, Homo Sapien
IQPPLGFGK

SEQ ID NO: 2767 - protein, 18 aa, Homo Sapien
LLDQVIPPIGDDEVTVGK

SEQ ID NO: 2768 - protein, 8 aa, Homo Sapien
PLAELQLK

SEQ ID NO: 2769 - protein, 21 aa, Homo Sapien
EAFLNTEDKGDSLDSVEALIK

SEQ ID NO: 2770 - protein, 11 aa, Homo Sapien
KVEDLFLTFAK

SEQ ID NO: 2771 - protein, 19 aa, Homo Sapien
IAALQAFADQLIAAGHYAK

SEQ ID NO: 2772 - protein, 14 aa, Homo Sapien
LAALADQWQFLVQK

SEQ ID NO: 2773 - protein, 11 aa, Homo Sapien
QELGGLGISIK

SEQ ID NO: 2774 - protein, 9 aa, Homo Sapien
TIIQSPYEK

SEQ ID NO: 2775 - protein, 14 aa, Homo Sapien
IFVGGLSPDTPEEK

SEQ ID NO: 2776 - protein, 14 aa, Homo Sapien
FVGDPALVLNDIHK

SEQ ID NO: 2777 - protein, 15 aa, Homo Sapien
FVGDPALVLNDIHKK

SEQ ID NO: 2778 - protein, 7 aa, Homo Sapien
VSTVFWK

SEQ ID NO: 2779 - protein, 14 aa, Homo Sapien
KPPKPQLMANYYNK

SEQ ID NO: 2780 - protein, 11 aa, Homo Sapien
LLDMDGIIVEK

SEQ ID NO: 2781 - protein, 11 aa, Homo Sapien
LYHDIAQQAFK

SEQ ID NO: 2782 - protein, 12 aa, Homo Sapien
NQLTAMSSVLAK

SEQ ID NO: 2783 - protein, 13 aa, Homo Sapien
GMTTVDDFFQGTK

SEQ ID NO: 2784 - protein, 13 aa, Homo Sapien
QIGDNLIVPGGVK

SEQ ID NO: 2785 - protein, 12 aa, Homo Sapien
AEITDAEGLGLK

SEQ ID NO: 2786 - protein, 10 aa, Homo Sapien
IQLEQVQEWK

SEQ ID NO: 2787 - protein, 25 aa, Homo Sapien
QSQIQVFEDGADTTSPETPDSSASK

SEQ ID NO: 2788 - protein, 10 aa, Homo Sapien
WVGVILDEAK

SEQ ID NO: 2789 - protein, 17 aa, Homo Sapien
IKQLQNISLAAASGGAK

SEQ ID NO: 2790 - protein, 10 aa, Homo Sapien
EHINSVSAMK

SEQ ID NO: 2791 - protein, 13 aa, Homo Sapien
FQSISTEFLALMK

SEQ ID NO: 2792 - protein, 14 aa, Homo Sapien
QALETVNDYNPLMK

SEQ ID NO: 2793 - protein, 15 aa, Homo Sapien
QLQNISLAAASGGAK

SEQ ID NO: 2794 - protein, 9 aa, Homo Sapien
SNLPDNLKK

SEQ ID NO: 2795 - protein, 14 aa, Homo Sapien
TPNGVVLAPVQLGK

SEQ ID NO: 2796 - protein, 10 aa, Homo Sapien
TPVSITEHPK

SEQ ID NO: 2797 - protein, 8 aa, Homo Sapien
TSDQTWVK

SEQ ID NO: 2798 - protein, 16 aa, Homo Sapien
YKEEYAVLISEAQAIK

SEQ ID NO: 2799 - protein, 13 aa, Homo Sapien
DLPPVSGSIIWAK

SEQ ID NO: 2800 - protein, 13 aa, Homo Sapien
FNYGFEYLGVQDK

SEQ ID NO: 2801 - protein, 11 aa, Homo Sapien
IFVFEPPPGVK

SEQ ID NO: 2802 - protein, 13 aa, Homo Sapien
LGGSPFGPAGTGK

SEQ ID NO: 2803 - protein, 16 aa, Homo Sapien
QTDVLQQLSIQMANAK

SEQ ID NO: 2804 - protein, 13 aa, Homo Sapien
VLLTTQGVDMISK

SEQ ID NO: 2805 - protein, 12 aa, Homo Sapien
VNFLPEIITLSK

SEQ ID NO: 2806 - protein, 12 aa, Homo Sapien
VQVALEELQDLK

SEQ ID NO: 2807 - protein, 12 aa, Homo Sapien
GFKDQIYEIFQK

SEQ ID NO: 2808 - protein, 10 aa, Homo Sapien
KEELTLEGIK

SEQ ID NO: 2809 - protein, 11 aa, Homo Sapien
VPVKDVVDPGK

SEQ ID NO: 2810 - protein, 26 aa, Homo Sapien
FIPHENGVHSIDVKFNGAHIPGSPFK

SEQ ID NO: 2811 - protein, 17 aa, Homo Sapien
SPFVVNVAPPLDLSKIK

SEQ ID NO: 2812 - protein, 12 aa, Homo Sapien
AKLDVQFAGTAK

SEQ ID NO: 2813 - protein, 19 aa, Homo Sapien
DAGEGLLTVQILDPEGKPK

SEQ ID NO: 2814 - protein, 11 aa, Homo Sapien
IKVLPAHDASK

SEQ ID NO: 2815 - protein, 9 aa, Homo Sapien
IKVQGLNSK

SEQ ID NO: 2816 - protein, 13 aa, Homo Sapien
AWGPGLETGQVGK

SEQ ID NO: 2817 - protein, 16 aa, Homo Sapien
DAGEGGLSLAVEGPSK

SEQ ID NO: 2818 - protein, 15 aa, Homo Sapien
DFEIIDNHDYSYTVK

SEQ ID NO: 2819 - protein, 24 aa, Homo Sapien
DNGDGTHTVHYTPATDGPYTVAVK

SEQ ID NO: 2820 - protein, 12 aa, Homo Sapien
FNGAHIPGSPFK

SEQ ID NO: 2821 - protein, 14 aa, Homo Sapien
FVPQEMGPHTVAVK

SEQ ID NO: 2822 - protein, 9 aa, Homo Sapien
HIGISFTPK

SEQ ID NO: 2823 - protein, 14 aa, Homo Sapien
HTIIISWGGVNVPK

SEQ ID NO: 2824 - protein, 11 aa, Homo Sapien
IHALPTGDASK

SEQ ID NO: 2825 - protein, 14 aa, Homo Sapien
IQIGQETVITVDAK

SEQ ID NO: 2826 - protein, 10 aa, Homo Sapien
LDVQFAGTAK

SEQ ID NO: 2827 - protein, 12 aa, Homo Sapien
LTVTSLQETGLK

SEQ ID NO: 2828 - protein, 15 aa, Homo Sapien
SPFEVQVSPEAGVQK

SEQ ID NO: 2829 - protein, 13 aa, Homo Sapien
VHVQPAVDTSGVK

SEQ ID NO: 2830 - protein, 9 aa, Homo Sapien
VYNVTYTVK

SEQ ID NO: 2831 - protein, 12 aa, Homo Sapien
WGDESVPGSPFK

SEQ ID NO: 2832 - protein, 22 aa, Homo Sapien
YTAVQQGNMAVTVTYGGDPVPK

SEQ ID NO: 2833 - protein, 20 aa, Homo Sapien
YTIMVLFANQEIPASPFHIK

SEQ ID NO: 2834 - protein, 8 aa, Homo Sapien
VKEVADFK

SEQ ID NO: 2835 - protein, 10 aa, Homo Sapien
EKGDYILIVK

SEQ ID NO: 2836 - protein, 14 aa, Homo Sapien
FDDKHIPGSPFTAK

SEQ ID NO: 2837 - protein, 14 aa, Homo Sapien
FADKHVPGSPFTVK

SEQ ID NO: 2838 - protein, 25 aa, Homo Sapien
HVSAYGPGLSHGMVNKPATFTIVTK

SEQ ID NO: 2839 - protein, 16 aa, Homo Sapien
TGVEVGKPTHFTVLTK

SEQ ID NO: 2840 - protein, 10 aa, Homo Sapien
VKVYGPGVEK

SEQ ID NO: 2841 - protein, 13 aa, Homo Sapien
AFGPGLEGGLVNK

SEQ ID NO: 2842 - protein, 14 aa, Homo Sapien
AGTNMMMVGVHGPK

SEQ ID NO: 2843 - protein, 18 aa, Homo Sapien
GAGTGGLGLAIEGPSEAK

SEQ ID NO: 2844 - protein, 15 aa, Homo Sapien
GGLVGTPAPFSIDTK

SEQ ID NO: 2845 - protein, 12 aa, Homo Sapien
GPGLSQAFVGQK

SEQ ID NO: 2846 - protein, 8 aa, Homo Sapien
HVTNSPFK

SEQ ID NO: 2847 - protein, 13 aa, Homo Sapien
ILVGPSEIGDASK

SEQ ID NO: 2848 - protein, 20 aa, Homo Sapien
LSGGHSLHETSTVLVETVTK

SEQ ID NO: 2849 - protein, 21 aa, Homo Sapien
QQEGEASSQDMTAQVTSPSGK

SEQ ID NO: 2850 - protein, 15 aa, Homo Sapien
SPFVVNVAPPLDLSK

SEQ ID NO: 2851 - protein, 15 aa, Homo Sapien
TSQLNVGTSTDVSLK

SEQ ID NO: 2852 - protein, 13 aa, Homo Sapien
YGGPQHIVGSPFK

SEQ ID NO: 2853 - protein, 18 aa, Homo Sapien
KPDSVSVETGKDAVVVAK

SEQ ID NO: 2854 - protein, 13 aa, Homo Sapien
EAPPKEAPAEAPK

SEQ ID NO: 2855 - protein, 11 aa, Homo Sapien
TGITFKPFEYK

SEQ ID NO: 2856 - protein, 15 aa, Homo Sapien
KSDTAGELDFSGLLK

SEQ ID NO: 2857 - protein, 15 aa, Homo Sapien
KVGEQLNLVVPFQGK

SEQ ID NO: 2858 - protein, 8 aa, Homo Sapien
ASEQAVFK

SEQ ID NO: 2859 - protein, 14 aa, Homo Sapien
DDGNSEIMGYFVQK

SEQ ID NO: 2860 - protein, 20 aa, Homo Sapien
EAPPEDQSPTAEEPTGVFLK

SEQ ID NO: 2861 - protein, 15 aa, Homo Sapien
EVWGTNALVEWQAPK

SEQ ID NO: 2862 - protein, 12 aa, Homo Sapien
QDASGQSLESFK

SEQ ID NO: 2863 - protein, 14 aa, Homo Sapien
SDTAGELDFSGLLK

SEQ ID NO: 2864 - protein, 7 aa, Homo Sapien
SEQAVFK

SEQ ID NO: 2865 - protein, 13 aa, Homo Sapien
TSENAIVVVAGNK

SEQ ID NO: 2866 - protein, 14 aa, Homo Sapien
VGEQLNLVVPFQGK

SEQ ID NO: 2867 - protein, 11 aa, Homo Sapien
KPDSVSVETGK

SEQ ID NO: 2868 - protein, 7 aa, Homo Sapien
PQVVWTK

SEQ ID NO: 2869 - protein, 14 aa, Homo Sapien
QLEVLQDIADLTVK

SEQ ID NO: 2870 - protein, 17 aa, Homo Sapien
VFAVNAIGVSQPSMNTK

SEQ ID NO: 2871 - protein, 8 aa, Homo Sapien
YVFENVGK

SEQ ID NO: 2872 - protein, 11 aa, Homo Sapien
KLVAIVDPHIK

SEQ ID NO: 2873 - protein, 17 aa, Homo Sapien
VVIIGAGKPAAVVLQTK

SEQ ID NO: 2874 - protein, 17 aa, Homo Sapien
QAIPLDENEGIYVQDVK

SEQ ID NO: 2875 - protein, 17 aa, Homo Sapien
DITPLQVVLPNTALHLK

SEQ ID NO: 2876 - protein, 11 aa, Homo Sapien
IEGEGSVLQAK

SEQ ID NO: 2877 - protein, 22 aa, Homo Sapien
ELDDELMKEAVLYVDSQEAALK

SEQ ID NO: 2878 - protein, 14 aa, Homo Sapien
EAVLYVDSQEAALK

SEQ ID NO: 2879 - protein, 19 aa, Homo Sapien
GYLGVMPAYSAAEDALTTK

SEQ ID NO: 2880 - protein, 10 aa, Homo Sapien
TAAVSAIATK

SEQ ID NO: 2881 - protein, 11 aa, Homo Sapien
NSLTSKDPDIK

SEQ ID NO: 2882 - protein, 15 aa, Homo Sapien
LAATNALLNSLEFTK

SEQ ID NO: 2883 - protein, 9 aa, Homo Sapien
VAALQNLVK

SEQ ID NO: 2884 - protein, 11 aa, Homo Sapien
KELENQVGSLK

SEQ ID NO: 2885 - protein, 10 aa, Homo Sapien
LKFEMTEQEK

SEQ ID NO: 2886 - protein, 13 aa, Homo Sapien
DTDIASLQEELKK

SEQ ID NO: 2887 - protein, 29 aa, Homo Sapien
ELPTEPPYTAYVGNLPFNTVQGDIDAIFK

SEQ ID NO: 2888 - protein, 10 aa, Homo Sapien
KLEADSLEVK

SEQ ID NO: 2889 - protein, 10 aa, Homo Sapien
ISVLQNNYEK

SEQ ID NO: 2890 - protein, 16 aa, Homo Sapien
QQHQEQQALQQSTTAK

SEQ ID NO: 2891 - protein, 24 aa, Homo Sapien
ALDLFSDNAPPPELLEIINEDIAK

SEQ ID NO: 2892 - protein, 14 aa, Homo Sapien
GILPGVSPLALHIK

SEQ ID NO: 2893 - protein, 9 aa, Homo Sapien
DLEALVTDK

SEQ ID NO: 2894 - protein, 16 aa, Homo Sapien
FNVANGGPAPDVVSDK

SEQ ID NO: 2895 - protein, 18 aa, Homo Sapien
SFIGQQFAVGSHVYSVAK

SEQ ID NO: 2896 - protein, 16 aa, Homo Sapien
TDSFEYVDPVDGTVTK

SEQ ID NO: 2897 - protein, 17 aa, Homo Sapien
TDSFEYVDPVDGTVTKK

SEQ ID NO: 2898 - protein, 22 aa, Homo Sapien
AVTGYKDPYTGQQISLFQAMQK

SEQ ID NO: 2899 - protein, 17 aa, Homo Sapien
QYINAIKDYELQLVTYK

SEQ ID NO: 2900 - protein, 23 aa, Homo Sapien
AHEEQLKEAQAVPATLPELEATK

SEQ ID NO: 2901 - protein, 16 aa, Homo Sapien
VPPGYHPLDVEKEWGK

SEQ ID NO: 2902 - protein, 18 aa, Homo Sapien
SKGIYQSLEGAVQAGQLK

SEQ ID NO: 2903 - protein, 17 aa, Homo Sapien
AGLVGPEFHEKLLSAEK

SEQ ID NO: 2904 - protein, 10 aa, Homo Sapien
HKPLLIDMNK

SEQ ID NO: 2905 - protein, 16 aa, Homo Sapien
ETFEKTPVEVPVGGFK

SEQ ID NO: 2906 - protein, 18 aa, Homo Sapien
AALAHSEEVTASQVAATK

SEQ ID NO: 2907 - protein, 11 aa, Homo Sapien
AGLVGPEFHEK

SEQ ID NO: 2908 - protein, 17 aa, Homo Sapien
AGVVGPELHEQLLSAEK

SEQ ID NO: 2909 - protein, 9 aa, Homo Sapien
ATVSAPFGK

SEQ ID NO: 2910 - protein, 16 aa, Homo Sapien
DPYSGSTISLFQAMQK

SEQ ID NO: 2911 - protein, 16 aa, Homo Sapien
DPYTGQQISLFQAMQK

SEQ ID NO: 2912 - protein, 16 aa, Homo Sapien
DPYTGQSVSLFQALKK

SEQ ID NO: 2913 - protein, 11 aa, Homo Sapien
EGLTSIEEVTK

SEQ ID NO: 2914 - protein, 9 aa, Homo Sapien
FPVTDAVNK

SEQ ID NO: 2915 - protein, 16 aa, Homo Sapien
GANVIAGVWLEEAGQK

SEQ ID NO: 2916 - protein, 16 aa, Homo Sapien
GIYQSLEGAVQAGQLK

SEQ ID NO: 2917 - protein, 10 aa, Homo Sapien
GLVGPEFHEK

SEQ ID NO: 2918 - protein, 12 aa, Homo Sapien
IIITVVEEQEQK

SEQ ID NO: 2919 - protein, 10 aa, Homo Sapien
LLEAAAQSTK

SEQ ID NO: 2920 - protein, 8 aa, Homo Sapien
LSIYNALK

SEQ ID NO: 2921 - protein, 9 aa, Homo Sapien
LSIYNALKK

SEQ ID NO: 2922 - protein, 8 aa, Homo Sapien
LTVNEAVK

SEQ ID NO: 2923 - protein, 10 aa, Homo Sapien
QSSEAEIQAK

SEQ ID NO: 2924 - protein, 10 aa, Homo Sapien
QTLSIYQALK

SEQ ID NO: 2925 - protein, 14 aa, Homo Sapien
SLESLHSFVAAATK

SEQ ID NO: 2926 - protein, 9 aa, Homo Sapien
SSIAGLLLK

SEQ ID NO: 2927 - protein, 15 aa, Homo Sapien
THYSELTTLTSQYIK

SEQ ID NO: 2928 - protein, 11 aa, Homo Sapien
TPVEVPVGGFK

SEQ ID NO: 2929 - protein, 12 aa, Homo Sapien
LKAEAELLQQQK

SEQ ID NO: 2930 - protein, 11 aa, Homo Sapien
MGIVGPEFKDK

SEQ ID NO: 2931 - protein, 12 aa, Homo Sapien
AVTGYKDPYSGK

SEQ ID NO: 2932 - protein, 19 aa, Homo Sapien
LEDLLQDAQDEKEQLNEYK

SEQ ID NO: 2933 - protein, 13 aa, Homo Sapien
AKLEQLFQDEVAK

SEQ ID NO: 2934 - protein, 10 aa, Homo Sapien
LKTEAEIALK

SEQ ID NO: 2935 - protein, 10 aa, Homo Sapien
AEMEVLLASK

SEQ ID NO: 2936 - protein, 10 aa, Homo Sapien
AQAEVEGLGK

SEQ ID NO: 2937 - protein, 11 aa, Homo Sapien
AQLEPVASPAK

SEQ ID NO: 2938 - protein, 15 aa, Homo Sapien
DPYTEQTISLFQAMK

SEQ ID NO: 2939 - protein, 11 aa, Homo Sapien
EGVVGPELHHK

SEQ ID NO: 2940 - protein, 19 aa, Homo Sapien
GLFDEEMNEILTDPSDDTK

SEQ ID NO: 2941 - protein, 10 aa, Homo Sapien
LAEVEAALEK

SEQ ID NO: 2942 - protein, 11 aa, Homo Sapien
LEQLFQDEVAK

SEQ ID NO: 2943 - protein, 9 aa, Homo Sapien
LISLFQAMK

SEQ ID NO: 2944 - protein, 16 aa, Homo Sapien
LLDAQLSTGGIVDPSK

SEQ ID NO: 2945 - protein, 15 aa, Homo Sapien
LLDPEDVDVPQPDEK

SEQ ID NO: 2946 - protein, 10 aa, Homo Sapien
LLFNDVQTLK

SEQ ID NO: 2947 - protein, 10 aa, Homo Sapien
LQAEEVAQQK

SEQ ID NO: 2948 - protein, 10 aa, Homo Sapien
LQLEETDHQK

SEQ ID NO: 2949 - protein, 8 aa, Homo Sapien
LYVHEAVK

SEQ ID NO: 2950 - protein, 9 aa, Homo Sapien
QELEAELAK

SEQ ID NO: 2951 - protein, 11 aa, Homo Sapien
QLQLAQEAAQK

SEQ ID NO: 2952 - protein, 9 aa, Homo Sapien
SLSAIYLEK

SEQ ID NO: 2953 - protein, 27 aa, Homo Sapien
TQLASWSDPTEETGPVAGILDTETLEK

SEQ ID NO: 2954 - protein, 10 aa, Homo Sapien
VLADPSDDTK

SEQ ID NO: 2955 - protein, 13 aa, Homo Sapien
YSELTTLTSQYIK

SEQ ID NO: 2956 - protein, 12 aa, Homo Sapien
AQQQLEQEFNQK

SEQ ID NO: 2957 - protein, 20 aa, Homo Sapien
FLPWATPGLEGAAVPQTLEK

SEQ ID NO: 2958 - protein, 14 aa, Homo Sapien
QGPPQKPYTFLEEK

SEQ ID NO: 2959 - protein, 15 aa, Homo Sapien
LVFPAVGPQHAGVYK

SEQ ID NO: 2960 - protein, 12 aa, Homo Sapien
ALNEGGFQSIPK

SEQ ID NO: 2961 - protein, 14 aa, Homo Sapien
TIGLHVTEYEDNLK

SEQ ID NO: 2962 - protein, 11 aa, Homo Sapien
GIATNDVGIQK

SEQ ID NO: 2963 - protein, 8 aa, Homo Sapien
GMEPWTLK

SEQ ID NO: 2964 - protein, 10 aa, Homo Sapien
QLTSENLQSK

SEQ ID NO: 2965 - protein, 8 aa, Homo Sapien
LGDSQLVK

SEQ ID NO: 2966 - protein, 10 aa, Homo Sapien
YLAIAPPIIK

SEQ ID NO: 2967 - protein, 11 aa, Homo Sapien
LKELEVAEGGK

SEQ ID NO: 2968 - protein, 21 aa, Homo Sapien
LGPGGLDPVEVYESLPEELQK

SEQ ID NO: 2969 - protein, 13 aa, Homo Sapien
QIGENLIVPGGVK

SEQ ID NO: 2970 - protein, 19 aa, Homo Sapien
FQMPDQGMTSADDFFQGTK

SEQ ID NO: 2971 - protein, 11 aa, Homo Sapien
GIQEEMEALVK

SEQ ID NO: 2972 - protein, 11 aa, Homo Sapien
GSPLVVISQGK

SEQ ID NO: 2973 - protein, 23 aa, Homo Sapien
GTVVYGEPITASLGTDGSHYWSK

SEQ ID NO: 2974 - protein, 11 aa, Homo Sapien
AMLPPNSFQGK

SEQ ID NO: 2975 - protein, 13 aa, Homo Sapien
ATAEQISSQTGNK

SEQ ID NO: 2976 - protein, 10 aa, Homo Sapien
FNVIQPGPIK

SEQ ID NO: 2977 - protein, 8 aa, Homo Sapien
SLAAEWGK

SEQ ID NO: 2978 - protein, 13 aa, Homo Sapien
VAFITGGGTGLGK

SEQ ID NO: 2979 - protein, 9 aa, Homo Sapien
YTEQITNEK

SEQ ID NO: 2980 - protein, 12 aa, Homo Sapien
EAAIVDPVQPQK

SEQ ID NO: 2981 - protein, 15 aa, Homo Sapien
ITHLSTLQVGSLNVK

SEQ ID NO: 2982 - protein, 19 aa, Homo Sapien
LTTVLTTHHHWDHAGGNEK

SEQ ID NO: 2983 - protein, 13 aa, Homo Sapien
WLSAEIEDVKPAK

SEQ ID NO: 2984 - protein, 12 aa, Homo Sapien
FGPIPLGSLGWK

SEQ ID NO: 2985 - protein, 10 aa, Homo Sapien
IPQAIAQLSK

SEQ ID NO: 2986 - protein, 20 aa, Homo Sapien
LPHLPGLEDLGIQATPLELK

SEQ ID NO: 2987 - protein, 10 aa, Homo Sapien
NFDFEDVFVK

SEQ ID NO: 2988 - protein, 16 aa, Homo Sapien
DLKPENILLDDNMNIK

SEQ ID NO: 2989 - protein, 11 aa, Homo Sapien
VSGHPNIIQLK

SEQ ID NO: 2990 - protein, 16 aa, Homo Sapien
YQFGSPEWDDYSDTVK

SEQ ID NO: 2991 - protein, 19 aa, Homo Sapien
NTFSTDPVNFPNKAEGLEK

SEQ ID NO: 2992 - protein, 19 aa, Homo Sapien
SSKEESSVTSEENNFENPK

SEQ ID NO: 2993 - protein, 9 aa, Homo Sapien
IVLVPPYQK

SEQ ID NO: 2994 - protein, 10 aa, Homo Sapien
NDYLFQVEEK

SEQ ID NO: 2995 - protein, 16 aa, Homo Sapien
SGGINSEDQDNSPQHK

SEQ ID NO: 2996 - protein, 13 aa, Homo Sapien
SLSPSSSAESSVK

SEQ ID NO: 2997 - protein, 8 aa, Homo Sapien
VLNVSFEK

SEQ ID NO: 2998 - protein, 14 aa, Homo Sapien
FAGLHFFNPVPVMK

SEQ ID NO: 2999 - protein, 30 aa, Homo Sapien
TLSTIATSTDAASVVHSTDLVVEAIVENLK

SEQ ID NO: 3000 - protein, 13 aa, Homo Sapien
GDASKEDIDTAMK

SEQ ID NO: 3001 - protein, 8 aa, Homo Sapien
AGDEFVEK

SEQ ID NO: 3002 - protein, 22 aa, Homo Sapien
LGAGYPMGPFELLDYVGLDTTK

SEQ ID NO: 3003 - protein, 11 aa, Homo Sapien
INKESLLPVAK

SEQ ID NO: 3004 - protein, 9 aa, Homo Sapien
EFPTVPLVK

SEQ ID NO: 3005 - protein, 10 aa, Homo Sapien
GGTLTQYEGK

SEQ ID NO: 3006 - protein, 12 aa, Homo Sapien
GLPDNISSVLNK

SEQ ID NO: 3007 - protein, 8 aa, Homo Sapien
GPSVDWGK

SEQ ID NO: 3008 - protein, 15 aa, Homo Sapien
IFNTNNLWISLAAVK

SEQ ID NO: 3009 - protein, 14 aa, Homo Sapien
ILTTASSHEFEHTK

SEQ ID NO: 3010 - protein, 15 aa, Homo Sapien
ILTTASSHEFEHTKK

SEQ ID NO: 3011 - protein, 8 aa, Homo Sapien
QELELSVK

SEQ ID NO: 3012 - protein, 7 aa, Homo Sapien
AHVDEFK

SEQ ID NO: 3013 - protein, 12 aa, Homo Sapien
IDIPPGAVLENK

SEQ ID NO: 3014 - protein, 9 aa, Homo Sapien
LVEIAQVPK

SEQ ID NO: 3015 - protein, 18 aa, Homo Sapien
NENTFLDLTVQQIEHLNK

SEQ ID NO: 3016 - protein, 20 aa, Homo Sapien
TLDGGLNVIQLETAVGAAIK

SEQ ID NO: 3017 - protein, 25 aa, Homo Sapien
TTSDLLLVMSNLYSLNAGSLTMSEK

SEQ ID NO: 3018 - protein, 22 aa, Homo Sapien
TYNTDVPLVLMNSFNTDEDTKK

SEQ ID NO: 3019 - protein, 13 aa, Homo Sapien
KAHQLWLSVEALK

SEQ ID NO: 3020 - protein, 15 aa, Homo Sapien
EVAGAKPHITAAEGK

SEQ ID NO: 3021 - protein, 17 aa, Homo Sapien
VQEQELKSEFEQNLSEK

SEQ ID NO: 3022 - protein, 12 aa, Homo Sapien
AAMDNSEIAGEK

SEQ ID NO: 3023 - protein, 13 aa, Homo Sapien
AAMDNSEIAGEKK

SEQ ID NO: 3024 - protein, 10 aa, Homo Sapien
GMSVSDLADK

SEQ ID NO: 3025 - protein, 13 aa, Homo Sapien
LHNMIVDLDNVVK

SEQ ID NO: 3026 - protein, 10 aa, Homo Sapien
SEFEQNLSEK

SEQ ID NO: 3027 - protein, 19 aa, Homo Sapien
TSSAETPTIPLGSAVEAIK

SEQ ID NO: 3028 - protein, 13 aa, Homo Sapien
YSTSGSSGLTTGK

SEQ ID NO: 3029 - protein, 11 aa, Homo Sapien
AVDEAADALLK

SEQ ID NO: 3030 - protein, 9 aa, Homo Sapien
ISSVSEVMK

SEQ ID NO: 3031 - protein, 12 aa, Homo Sapien
SPGADLLQVLTK

SEQ ID NO: 3032 - protein, 17 aa, Homo Sapien
VAGALAEAGVGLEEIAK

SEQ ID NO: 3033 - protein, 21 aa, Homo Sapien
VALLSGGGSGHEPAHAGFIGK

SEQ ID NO: 3034 - protein, 21 aa, Homo Sapien
VAPAEPQEAPDSTAAGGSASK

SEQ ID NO: 3035 - protein, 16 aa, Homo Sapien
TKPPEGYDTVTLYPKA

SEQ ID NO: 3036 - protein, 20 aa, Homo Sapien
GETHLWSPQVSEDGKAHPFK

SEQ ID NO: 3037 - protein, 15 aa, Homo Sapien
TKPPEGYDTVTLYPK

SEQ ID NO: 3038 - protein, 15 aa, Homo Sapien
GETHLWSPQVSEDGK

SEQ ID NO: 3039 - protein, 16 aa, Homo Sapien
INLESEPQDGNYFEHK

SEQ ID NO: 3040 - protein, 15 aa, Homo Sapien
LAPNIPLEMELPGVK

SEQ ID NO: 3041 - protein, 11 aa, Homo Sapien
LWSPQVSEDGK

SEQ ID NO: 3042 - protein, 22 aa, Homo Sapien
LSSVTEDEDQDAALTIVTVLDK

SEQ ID NO: 3043 - protein, 13 aa, Homo Sapien
VASIVDSVQASQK

SEQ ID NO: 3044 - protein, 12 aa, Homo Sapien
FSNSSSSNEFSK

SEQ ID NO: 3045 - protein, 19 aa, Homo Sapien
HQEEESETEEDEEDTPGHK

SEQ ID NO: 3046 - protein, 14 aa, Homo Sapien
STHGLAILGPENPK

SEQ ID NO: 3047 - protein, 12 aa, Homo Sapien
ALGTLGMTTNEK

SEQ ID NO: 3048 - protein, 24 aa, Homo Sapien
NAAQELATLLLSLPAPASVQQQSK

SEQ ID NO: 3049 - protein, 13 aa, Homo Sapien
KPPLQPPVDPVVK

SEQ ID NO: 3050 - protein, 10 aa, Homo Sapien
DGALLTTGNK

SEQ ID NO: 3051 - protein, 10 aa, Homo Sapien
ELLIHQLEAK

SEQ ID NO: 3052 - protein, 10 aa, Homo Sapien
GSQELQPGPK

SEQ ID NO: 3053 - protein, 15 aa, Homo Sapien
ISPANYEPVHWFLDK

SEQ ID NO: 3054 - protein, 22 aa, Homo Sapien
LHEEAQLLAELSDQAAAVTWLK

SEQ ID NO: 3055 - protein, 11 aa, Homo Sapien
LSFSLDVAEPK

SEQ ID NO: 3056 - protein, 24 aa, Homo Sapien
LSPEWGAAEAPEFPGEAVSEDEYK

SEQ ID NO: 3057 - protein, 8 aa, Homo Sapien
TSATLTVK

SEQ ID NO: 3058 - protein, 17 aa, Homo Sapien
VQAESVVVSTAIQEFYK

SEQ ID NO: 3059 - protein, 18 aa, Homo Sapien
VQAESVVVSTAIQEFYKK

SEQ ID NO: 3060 - protein, 24 aa, Homo Sapien
VSALNSFGQSPYLEFPGTVHLAPK

SEQ ID NO: 3061 - protein, 14 aa, Homo Sapien
VVDLGNAQSLSQEK

SEQ ID NO: 3062 - protein, 16 aa, Homo Sapien
AVQWYKDDTPLSPSEK

SEQ ID NO: 3063 - protein, 15 aa, Homo Sapien
EGQDFPVQVEEVAAK

SEQ ID NO: 3064 - protein, 11 aa, Homo Sapien
NEMVIGWKPPK

SEQ ID NO: 3065 - protein, 11 aa, Homo Sapien
KTEIPFDLGNK

SEQ ID NO: 3066 - protein, 9 aa, Homo Sapien
APLTYSLEK

SEQ ID NO: 3067 - protein, 10 aa, Homo Sapien
DAGFDSEIFK

SEQ ID NO: 3068 - protein, 14 aa, Homo Sapien
LSPAAELHLIFNNK

SEQ ID NO: 3069 - protein, 10 aa, Homo Sapien
TEIPFDLGNK

SEQ ID NO: 3070 - protein, 12 aa, Homo Sapien
GLPDVATIMEDK

SEQ ID NO: 3071 - protein, 10 aa, Homo Sapien
IGALSATPLK

SEQ ID NO: 3072 - protein, 13 aa, Homo Sapien
ALDEPAKTESVSK

SEQ ID NO: 3073 - protein, 15 aa, Homo Sapien
AFAAIPTNTLLLEQK

SEQ ID NO: 3074 - protein, 12 aa, Homo Sapien
EEEVYEPNPFSK

SEQ ID NO: 3075 - protein, 16 aa, Homo Sapien
ISNIPSLIFLDATTGK

SEQ ID NO: 3076 - protein, 12 aa, Homo Sapien
AGIATHFVDSEK

SEQ ID NO: 3077 - protein, 12 aa, Homo Sapien
LAMLEEDLLALK

SEQ ID NO: 3078 - protein, 13 aa, Homo Sapien
VMIYQDEVKLPAK

SEQ ID NO: 3079 - protein, 17 aa, Homo Sapien
QAEMEGAVQSIQGELSK

SEQ ID NO: 3080 - protein, 9 aa, Homo Sapien
VMIYQDEVK

SEQ ID NO: 3081 - protein, 12 aa, Homo Sapien
LLPQVDTTGTFK

SEQ ID NO: 3082 - protein, 14 aa, Homo Sapien
NITEPIITLEGHSK

SEQ ID NO: 3083 - protein, 17 aa, Homo Sapien
KVDIIADAAYSIFQKPK

SEQ ID NO: 3084 - protein, 18 aa, Homo Sapien
LLGTIYTAAEEIEAVGGK

SEQ ID NO: 3085 - protein, 13 aa, Homo Sapien
LDIQLPIISDDFK

SEQ ID NO: 3086 - protein, 16 aa, Homo Sapien
VLEEVADKPQTEFLMK

SEQ ID NO: 3087 - protein, 9 aa, Homo Sapien
GAVGEQLGK

SEQ ID NO: 3088 - protein, 12 aa, Homo Sapien
QKEVFQALEAGK

SEQ ID NO: 3089 - protein, 11 aa, Homo Sapien
SEIQELKGDVK

SEQ ID NO: 3090 - protein, 16 aa, Homo Sapien
WLFETKPLDELTGQAK

SEQ ID NO: 3091 - protein, 28 aa, Homo Sapien
AVPLAGEAAAPAQLQNTEKQEDSHSGQK

SEQ ID NO: 3092 - protein, 19 aa, Homo Sapien
AVPLAGEAAAPAQLQNTEK

SEQ ID NO: 3093 - protein, 16 aa, Homo Sapien
MATAEAQSLHQQVLNK

SEQ ID NO: 3094 - protein, 11 aa, Homo Sapien
QGSEVTDPTAK

SEQ ID NO: 3095 - protein, 16 aa, Homo Sapien
EADGSETPEPFAAEAK

SEQ ID NO: 3096 - protein, 13 aa, Homo Sapien
VITEYLNAQESAK

SEQ ID NO: 3097 - protein, 19 aa, Homo Sapien
APGDQAWTQALPSVIKEEK

SEQ ID NO: 3098 - protein, 21 aa, Homo Sapien
KIPGISSTGVGDGGNELGMGK

SEQ ID NO: 3099 - protein, 16 aa, Homo Sapien
APGDQAWTQALPSVIK

SEQ ID NO: 3100 - protein, 14 aa, Homo Sapien
HLVDPIDDLFLAAK

SEQ ID NO: 3101 - protein, 24 aa, Homo Sapien
IPEVHHISQDPLHYSIASVSASQK

SEQ ID NO: 3102 - protein, 12 aa, Homo Sapien
IVEDAVEQGVLK

SEQ ID NO: 3103 - protein, 13 aa, Homo Sapien
EGAGAVDEEDFIK

SEQ ID NO: 3104 - protein, 13 aa, Homo Sapien
LLSLISIALPENK

SEQ ID NO: 3105 - protein, 14 aa, Homo Sapien
DNEVNHALEQQEAK

SEQ ID NO: 3106 - protein, 13 aa, Homo Sapien
ESLLVSHPSVQTK

SEQ ID NO: 3107 - protein, 12 aa, Homo Sapien
SAPSMPSQGLAK

SEQ ID NO: 3108 - protein, 11 aa, Homo Sapien
SDAGWYTLSAK

SEQ ID NO: 3109 - protein, 12 aa, Homo Sapien
VIGMPPPVFYWK

SEQ ID NO: 3110 - protein, 8 aa, Homo Sapien
KAPVILEK

SEQ ID NO: 3111 - protein, 15 aa, Homo Sapien
KIYHSSIKPLEQSYK

SEQ ID NO: 3112 - protein, 16 aa, Homo Sapien
EAYKDFFGINPISSFK

SEQ ID NO: 3113 - protein, 18 aa, Homo Sapien
AITQELPGLLGSLGLGKN

SEQ ID NO: 3114 - protein, 14 aa, Homo Sapien
IYHSSIKPLEQSYK

SEQ ID NO: 3115 - protein, 17 aa, Homo Sapien
AITQELPGLLGSLGLGK

SEQ ID NO: 3116 - protein, 12 aa, Homo Sapien
ALYADTAPQDKK

SEQ ID NO: 3117 - protein, 12 aa, Homo Sapien
DFFGINPISSFK

SEQ ID NO: 3118 - protein, 11 aa, Homo Sapien
VLFLGPWSVGK

SEQ ID NO: 3119 - protein, 13 aa, Homo Sapien
DIVEDPDKFYIFK

SEQ ID NO: 3120 - protein, 25 aa, Homo Sapien
QHEITDGEITSKPMVLFLGPWSVGK

SEQ ID NO: 3121 - protein, 12 aa, Homo Sapien
ADLIFVVFDPTK

SEQ ID NO: 3122 - protein, 8 aa, Homo Sapien
FGQNFLEK

SEQ ID NO: 3123 - protein, 9 aa, Homo Sapien
LIGIEVPHK

SEQ ID NO: 3124 - protein, 12 aa, Homo Sapien
MTFFSDGELVFK

SEQ ID NO: 3125 - protein, 13 aa, Homo Sapien
PMVLFLGPWSVGK

SEQ ID NO: 3126 - protein, 12 aa, Homo Sapien
QHEITDGEITSK

SEQ ID NO: 3127 - protein, 22 aa, Homo Sapien
YQLYTGAEPTTSEFTVLMHGPK

SEQ ID NO: 3128 - protein, 13 aa, Homo Sapien
HLGGHEGTIPSKV

SEQ ID NO: 3129 - protein, 11 aa, Homo Sapien
AHAMAQVDAWK

SEQ ID NO: 3130 - protein, 20 aa, Homo Sapien
DGYADIVDVLNSPLEGPDQK

SEQ ID NO: 3131 - protein, 11 aa, Homo Sapien
GPGVGLLGISK

SEQ ID NO: 3132 - protein, 13 aa, Homo Sapien
DAVSNTTNQLESK

SEQ ID NO: 3133 - protein, 13 aa, Homo Sapien
AVAALLTIPEAEK

SEQ ID NO: 3134 - protein, 14 aa, Homo Sapien
ITSEALLVTQQLVK

SEQ ID NO: 3135 - protein, 14 aa, Homo Sapien
EGPAVVGQFIQDVK

SEQ ID NO: 3136 - protein, 11 aa, Homo Sapien
AATNSYSQALK

SEQ ID NO: 3137 - protein, 11 aa, Homo Sapien
EVIPELVQLAK

SEQ ID NO: 3138 - protein, 17 aa, Homo Sapien
GLVIAYNLLAADAELAK

SEQ ID NO: 3139 - protein, 14 aa, Homo Sapien
ALIPLALEGTDVGK

SEQ ID NO: 3140 - protein, 9 aa, Homo Sapien
MLASILINK

SEQ ID NO: 3141 - protein, 14 aa, Homo Sapien
VAAIEALNDGELQK

SEQ ID NO: 3142 - protein, 13 aa, Homo Sapien
AIEINPDSAQPYK

SEQ ID NO: 3143 - protein, 13 aa, Homo Sapien
IPYFPANQEMLQK

SEQ ID NO: 3144 - protein, 11 aa, Homo Sapien
LDILDVLGEVK

SEQ ID NO: 3145 - protein, 10 aa, Homo Sapien
KGIGPTYSSK

SEQ ID NO: 3146 - protein, 25 aa, Homo Sapien
AVSFIGNGVVIHLPGLFEEAEKNEK

SEQ ID NO: 3147 - protein, 15 aa, Homo Sapien
DGVYFMYEALHGPPK

SEQ ID NO: 3148 - protein, 16 aa, Homo Sapien
DGVYFMYEALHGPPKK

SEQ ID NO: 3149 - protein, 15 aa, Homo Sapien
EYDFHLLPSGIINTK

SEQ ID NO: 3150 - protein, 12 aa, Homo Sapien
VEVEYETLPGWK

SEQ ID NO: 3151 - protein, 15 aa, Homo Sapien
YAHMVNGFTALALTK

SEQ ID NO: 3152 - protein, 9 aa, Homo Sapien
KALGITLIK

SEQ ID NO: 3153 - protein, 13 aa, Homo Sapien
LTDIINNDHENVK

SEQ ID NO: 3154 - protein, 9 aa, Homo Sapien
VMENGLLFK

SEQ ID NO: 3155 - protein, 16 aa, Homo Sapien
VIDDADEGKKPSPEVK

SEQ ID NO: 3156 - protein, 19 aa, Homo Sapien
VGKDDSYQPIAAEGEIWGK

SEQ ID NO: 3157 - protein, 20 aa, Homo Sapien
MFNSVKEELIPLQFYGTLPK

SEQ ID NO: 3158 - protein, 11 aa, Homo Sapien
IINEASQFKPK

SEQ ID NO: 3159 - protein, 30 aa, Homo Sapien
AVTVIDPEGTIPTNFNVAEKPADHSLSEVK

SEQ ID NO: 3160 - protein, 18 aa, Homo Sapien
GEDFTVTSKPAGLSEDQK

SEQ ID NO: 3161 - protein, 29 aa, Homo Sapien
SSETPPYLLSPVKPQTLASGASPEINAVK

SEQ ID NO: 3162 - protein, 13 aa, Homo Sapien
AVGTQPHPLEESK

SEQ ID NO: 3163 - protein, 15 aa, Homo Sapien
EIEPSSSTTTASVTK

SEQ ID NO: 3164 - protein, 11 aa, Homo Sapien
EQEPTAALTLK

SEQ ID NO: 3165 - protein, 15 aa, Homo Sapien
ETELPSSQNVSPASK

SEQ ID NO: 3166 - protein, 20 aa, Homo Sapien
QVEHGPPALAFSALSEEIKK

SEQ ID NO: 3167 - protein, 24 aa, Homo Sapien
SLMSTSEVLEPEHELPLSLWGEIK

SEQ ID NO: 3168 - protein, 17 aa, Homo Sapien
SNYAQFISNTSASNADK

SEQ ID NO: 3169 - protein, 17 aa, Homo Sapien
VAEQEDLETQPSPSVEK

SEQ ID NO: 3170 - protein, 13 aa, Homo Sapien
YAAPLNATQESQK

SEQ ID NO: 3171 - protein, 14 aa, Homo Sapien
EELIPLQFYGTLPK

SEQ ID NO: 3172 - protein, 13 aa, Homo Sapien
EKEYLLNQAAEWK

SEQ ID NO: 3173 - protein, 18 aa, Homo Sapien
QLEDIINTYGSAASTAGK

SEQ ID NO: 3174 - protein, 9 aa, Homo Sapien
SNEVFATFK

SEQ ID NO: 3175 - protein, 10 aa, Homo Sapien
SMFTFVEKPK

SEQ ID NO: 3176 - protein, 15 aa, Homo Sapien
SPPSYSVLYPSSDPK

SEQ ID NO: 3177 - protein, 15 aa, Homo Sapien
VASEEEEVPLVVYLK

SEQ ID NO: 3178 - protein, 13 aa, Homo Sapien
PKPNQNLSEASGK

SEQ ID NO: 3179 - protein, 17 aa, Homo Sapien
VTPNPDLLDLVQTADEK

SEQ ID NO: 3180 - protein, 11 aa, Homo Sapien
DNPKPSQEVVK

SEQ ID NO: 3181 - protein, 12 aa, Homo Sapien
MENVEVFTAEGK

SEQ ID NO: 3182 - protein, 17 aa, Homo Sapien
AYAILLVTHGPSHPITK

SEQ ID NO: 3183 - protein, 26 aa, Homo Sapien
EAALNNQPMQVMAEPSNEPSPALFHK

SEQ ID NO: 3184 - protein, 7 aa, Homo Sapien
EMIQFSK

SEQ ID NO: 3185 - protein, 10 aa, Homo Sapien
SEGLYHEVVK

SEQ ID NO: 3186 - protein, 16 aa, Homo Sapien
FDQLFDDESDPFEVLK

SEQ ID NO: 3187 - protein, 11 aa, Homo Sapien
KPNEGADGQWK

SEQ ID NO: 3188 - protein, 16 aa, Homo Sapien
SAAQAAAQTNSNAAGK

SEQ ID NO: 3189 - protein, 12 aa, Homo Sapien
DSNLLLEDVTWK

SEQ ID NO: 3190 - protein, 13 aa, Homo Sapien
NWQGGILSGGFEK

SEQ ID NO: 3191 - protein, 12 aa, Homo Sapien
LFGYEPTIYYPK

SEQ ID NO: 3192 - protein, 11 aa, Homo Sapien
AVSEEQQPALK

SEQ ID NO: 3193 - protein, 14 aa, Homo Sapien
NQDEESQEAPELLK

SEQ ID NO: 3194 - protein, 10 aa, Homo Sapien
STLLLLLTGK

SEQ ID NO: 3195 - protein, 16 aa, Homo Sapien
DWSYPYEHSYGLEGGK

SEQ ID NO: 3196 - protein, 15 aa, Homo Sapien
NLVPLLLAPENLVEK

SEQ ID NO: 3197 - protein, 18 aa, Homo Sapien
FHQDQSPVGGLTAEDIEK

SEQ ID NO: 3198 - protein, 9 aa, Homo Sapien
QSADFMPLK

SEQ ID NO: 3199 - protein, 12 aa, Homo Sapien
LPSEVSALQHLK

SEQ ID NO: 3200 - protein, 33 aa, Homo Sapien
NQFQDFPEQLTALPALETINLEENEIVDVPVEK

SEQ ID NO: 3201 - protein, 13 aa, Homo Sapien
LGINLLGGPLGGK

SEQ ID NO: 3202 - protein, 11 aa, Homo Sapien
NIQVSHQEFSK

SEQ ID NO: 3203 - protein, 16 aa, Homo Sapien
SVIEQGGIQTVDQLIK

SEQ ID NO: 3204 - protein, 10 aa, Homo Sapien
LALASLGYEK

SEQ ID NO: 3205 - protein, 22 aa, Homo Sapien
KPPPPTTLIPAKAPEIIDVSSK

SEQ ID NO: 3206 - protein, 26 aa, Homo Sapien
DGKPLKDSPNVQTSFLDNTATLNIFK

SEQ ID NO: 3207 - protein, 19 aa, Homo Sapien
FGLSKPSEPSEPTITKEDK

SEQ ID NO: 3208 - protein, 11 aa, Homo Sapien
KPEPKEEVVLK

SEQ ID NO: 3209 - protein, 14 aa, Homo Sapien
KPEAPPPKEPEPEK

SEQ ID NO: 3210 - protein, 16 aa, Homo Sapien
KPDNKEPVLYDTHVNK

SEQ ID NO: 3211 - protein, 20 aa, Homo Sapien
TASIEIVTLDKPDPPKGPVK

SEQ ID NO: 3212 - protein, 21 aa, Homo Sapien
ITIPTFKPDKIELSPSMEAPK

SEQ ID NO: 3213 - protein, 14 aa, Homo Sapien
KPVPEEKIPVPVAK

SEQ ID NO: 3214 - protein, 13 aa, Homo Sapien
KDGTLLKPAEGIK

SEQ ID NO: 3215 - protein, 14 aa, Homo Sapien
VTIKDKPAVAPATK

SEQ ID NO: 3216 - protein, 11 aa, Homo Sapien
WKKPAYDGGSK

SEQ ID NO: 3217 - protein, 24 aa, Homo Sapien
DSALVTWNKPHDGGKPITNYILEK

SEQ ID NO: 3218 - protein, 27 aa, Homo Sapien
IKTADQDLVVDVGKPLTMVVPYDAYPK

SEQ ID NO: 3219 - protein, 22 aa, Homo Sapien
VIAENKFGLSKPSEPSEPTITK

SEQ ID NO: 3220 - protein, 19 aa, Homo Sapien
SPFEKPGAPGKPTITAVTK

SEQ ID NO: 3221 - protein, 23 aa, Homo Sapien
KPAVPEPPPPKPVEEVEVPTVTK

SEQ ID NO: 3222 - protein, 12 aa, Homo Sapien
VPEVPKKPVPEK

SEQ ID NO: 3223 - protein, 13 aa, Homo Sapien
VPEVPKKPVPEEK

SEQ ID NO: 3224 - protein, 14 aa, Homo Sapien
LYKPVFVLKPVSFK

SEQ ID NO: 3225 - protein, 22 aa, Homo Sapien
VSAENQFGISKPLKSEEPVTPK

SEQ ID NO: 3226 - protein, 16 aa, Homo Sapien
KPVPEEKVAVPVPVAK

SEQ ID NO: 3227 - protein, 14 aa, Homo Sapien
KPEAPPPKVPEAPK

SEQ ID NO: 3228 - protein, 14 aa, Homo Sapien
KPEVTPVKVPEAPK

SEQ ID NO: 3229 - protein, 14 aa, Homo Sapien
KPEAPPAKVPEVPK

SEQ ID NO: 3230 - protein, 14 aa, Homo Sapien
KPELPPVKVPEVPK

SEQ ID NO: 3231 - protein, 14 aa, Homo Sapien
KPEVPPAKVPEVPK

SEQ ID NO: 3232 - protein, 14 aa, Homo Sapien
KPEVPPTKVPEVPK

SEQ ID NO: 3233 - protein, 12 aa, Homo Sapien
KPEEKVPVLIPK

SEQ ID NO: 3234 - protein, 14 aa, Homo Sapien
KPVPEEKVPVPVPK

SEQ ID NO: 3235 - protein, 10 aa, Homo Sapien
ADSGDYVCKA

SEQ ID NO: 3236 - protein, 25 aa, Homo Sapien
LMLQNISPSDAGEYTAVVGQLECKA

SEQ ID NO: 3237 - protein, 13 aa, Homo Sapien
VNINDSGEYTCKA

SEQ ID NO: 3238 - protein, 11 aa, Homo Sapien
ITWTKADMILK

SEQ ID NO: 3239 - protein, 15 aa, Homo Sapien
APEIIDVSSKAEEVK

SEQ ID NO: 3240 - protein, 14 aa, Homo Sapien
KAEWEEVTNTAVEK

SEQ ID NO: 3241 - protein, 19 aa, Homo Sapien
NPFVVPDAPKAPEVTTVTK

SEQ ID NO: 3242 - protein, 38 aa, Homo Sapien
VMAENEYGIGEPTETTEPVKASEAPSPPDSLNIMDITK

SEQ ID NO: 3243 - protein, 30 aa, Homo Sapien
VKAVNEIGESEPSLPLNVVIQDDEVPPTIK

SEQ ID NO: 3244 - protein, 12 aa, Homo Sapien
KAVPEAPTPVPK

SEQ ID NO: 3245 - protein, 11 aa, Homo Sapien
KAVVQEEISQK

SEQ ID NO: 3246 - protein, 9 aa, Homo Sapien
TIDGKAWTK

SEQ ID NO: 3247 - protein, 17 aa, Homo Sapien
KDAGEYTITATNPFGTK

SEQ ID NO: 3248 - protein, 21 aa, Homo Sapien
ETHKDDGGQYGITVANVVGQK

SEQ ID NO: 3249 - protein, 23 aa, Homo Sapien
FESVSADQMTLSWFPPKDDGGSK

SEQ ID NO: 3250 - protein, 19 aa, Homo Sapien
WAPPKDDGGSEITNYILEK

SEQ ID NO: 3251 - protein, 17 aa, Homo Sapien
SVWKDDTSTSLELFAAK

SEQ ID NO: 3252 - protein, 15 aa, Homo Sapien
VLWYKDETEIQESSK

SEQ ID NO: 3253 - protein, 8 aa, Homo Sapien
VSWFKDGK

SEQ ID NO: 3254 - protein, 17 aa, Homo Sapien
SSADLEWSPPLKDGGSK

SEQ ID NO: 3255 - protein, 13 aa, Homo Sapien
WFKDGQELTLGSK

SEQ ID NO: 3256 - protein, 12 aa, Homo Sapien
VTWFKDGVEIEK

SEQ ID NO: 3257 - protein, 20 aa, Homo Sapien
LSQTEPVTLIKDIENQTVLK

SEQ ID NO: 3258 - protein, 10 aa, Homo Sapien
TKDPIHPYTK

SEQ ID NO: 3259 - protein, 11 aa, Homo Sapien
VTKDPIHPYTK

SEQ ID NO: 3260 - protein, 18 aa, Homo Sapien
KDSAFLVWEPPIIDGGAK

SEQ ID NO: 3261 - protein, 29 aa, Homo Sapien
EISKDSAYVTWEPPIIDGGSPIINYVVQK

SEQ ID NO: 3262 - protein, 20 aa, Homo Sapien
KDSGYYSLTAENSSGTDTQK

SEQ ID NO: 3263 - protein, 31 aa, Homo Sapien
FGDITKDSVHLTWEPPDDDGGSPLTGYVVEK

SEQ ID NO: 3264 - protein, 23 aa, Homo Sapien
VTEITKDSVSITWEPPLLDGGSK

SEQ ID NO: 3265 - protein, 14 aa, Homo Sapien
YKDTIVVHAGESFK

SEQ ID NO: 3266 - protein, 13 aa, Homo Sapien
KDTWGVVSSGSSK

SEQ ID NO: 3267 - protein, 22 aa, Homo Sapien
VSVYSVDVITPLKDVNVIEGTK

SEQ ID NO: 3268 - protein, 16 aa, Homo Sapien
EVGKDVWMPVTSASAK

SEQ ID NO: 3269 - protein, 11 aa, Homo Sapien
IIGYHLEQKEK

SEQ ID NO: 3270 - protein, 17 aa, Homo Sapien
DVTKEDQGEYSFVIDGK

SEQ ID NO: 3271 - protein, 9 aa, Homo Sapien
LALKEEASK

SEQ ID NO: 3272 - protein, 10 aa, Homo Sapien
KEEEVPPPPK

SEQ ID NO: 3273 - protein, 19 aa, Homo Sapien
VSKEEMTVVWNPPEYDGGK

SEQ ID NO: 3274 - protein, 13 aa, Homo Sapien
DLSLVVTGLKEGK

SEQ ID NO: 3275 - protein, 20 aa, Homo Sapien
VSGENEFGVGIPAETKEGVK

SEQ ID NO: 3276 - protein, 10 aa, Homo Sapien
FSGTKEITAK

SEQ ID NO: 3277 - protein, 29 aa, Homo Sapien
TEHGYEASIAGSAIATLQKELSATSSAQK

SEQ ID NO: 3278 - protein, 13 aa, Homo Sapien
AQVKELSSTAQLK

SEQ ID NO: 3279 - protein, 11 aa, Homo Sapien
LFVKEPAAFLK

SEQ ID NO: 3280 - protein, 24 aa, Homo Sapien
AVLTVQEPPSFVKEPEPLEVLPGK

SEQ ID NO: 3281 - protein, 34 aa, Homo Sapien
YGQSFALESDPIVAQYPYKEPGPPGTPFATAISK

SEQ ID NO: 3282 - protein, 24 aa, Homo Sapien
AVIVQYPFKEPGPPGTPFVTSISK

SEQ ID NO: 3283 - protein, 12 aa, Homo Sapien
VPEAPKEVVPEK

SEQ ID NO: 3284 - protein, 14 aa, Homo Sapien
VPEVLPPKEVVPEK

SEQ ID NO: 3285 - protein, 12 aa, Homo Sapien
VPEVPKEVVPEK

SEQ ID NO: 3286 - protein, 9 aa, Homo Sapien
NVDPKEYEK

SEQ ID NO: 3287 - protein, 21 aa, Homo Sapien
PGIPTGPIKFDEVTAEAMTLK

SEQ ID NO: 3288 - protein, 16 aa, Homo Sapien
KGAGEEEEIDIMELLK

SEQ ID NO: 3289 - protein, 16 aa, Homo Sapien
KGEDEVVTSSHLAVHK

SEQ ID NO: 3290 - protein, 14 aa, Homo Sapien
GKGEQTWSHAGISK

SEQ ID NO: 3291 - protein, 9 aa, Homo Sapien
SDKGIYTLK

SEQ ID NO: 3292 - protein, 13 aa, Homo Sapien
KGSDQWTHITTVK

SEQ ID NO: 3293 - protein, 15 aa, Homo Sapien
ELSADSKHHITFINK

SEQ ID NO: 3294 - protein, 18 aa, Homo Sapien
NNMVVVQGDKHQMMSEGK

SEQ ID NO: 3295 - protein, 13 aa, Homo Sapien
YMFEAEDKHTSGK

SEQ ID NO: 3296 - protein, 16 aa, Homo Sapien
IGYSDPSDVPDKHYPK

SEQ ID NO: 3297 - protein, 10 aa, Homo Sapien
EQLKIDVPFK

SEQ ID NO: 3298 - protein, 12 aa, Homo Sapien
IPAKIEEPPPAK

SEQ ID NO: 3299 - protein, 10 aa, Homo Sapien
KIENTTTVLK

SEQ ID NO: 3300 - protein, 14 aa, Homo Sapien
KIEPLEVALGHLAK

SEQ ID NO: 3301 - protein, 19 aa, Homo Sapien
AENKIGVGPPLDSTPTVAK

SEQ ID NO: 3302 - protein, 13 aa, Homo Sapien
ELSATSSAQKITK

SEQ ID NO: 3303 - protein, 10 aa, Homo Sapien
TENKITLSIK

SEQ ID NO: 3304 - protein, 8 aa, Homo Sapien
YKIVLQNK

SEQ ID NO: 3305 - protein, 13 aa, Homo Sapien
DPIYPPDPPIKLK

SEQ ID NO: 3306 - protein, 17 aa, Homo Sapien
LIIAATKLDDIGEYTYK

SEQ ID NO: 3307 - protein, 16 aa, Homo Sapien
EPATFVEKLEPSQLLK

SEQ ID NO: 3308 - protein, 7 aa, Homo Sapien
KLIPEEK

SEQ ID NO: 3309 - protein, 11 aa, Homo Sapien
KLSDISTVVGK

SEQ ID NO: 3310 - protein, 8 aa, Homo Sapien
KMVISEEK

SEQ ID NO: 3311 - protein, 19 aa, Homo Sapien
IKNAMPEDIAEYAVEIEGK

SEQ ID NO: 3312 - protein, 11 aa, Homo Sapien
ISFKNNVAQLK

SEQ ID NO: 3313 - protein, 34 aa, Homo Sapien
YGVGEPLESEPVLAVNPYGPPDPPKNPEVTTITK

SEQ ID NO: 3314 - protein, 19 aa, Homo Sapien
VGGGEYIELKNPVIAQDPK

SEQ ID NO: 3315 - protein, 27 aa, Homo Sapien
AELIQVTAGDPATLEYTVAGTPELKPK

SEQ ID NO: 3316 - protein, 17 aa, Homo Sapien
IAVPITVITLGPPSKPK

SEQ ID NO: 3317 - protein, 11 aa, Homo Sapien
STVSLAWPKPK

SEQ ID NO: 3318 - protein, 12 aa, Homo Sapien
TVITLGPPSKPK

SEQ ID NO: 3319 - protein, 17 aa, Homo Sapien
VIEVFEAEEVEVFEKPK

SEQ ID NO: 3320 - protein, 12 aa, Homo Sapien
DGTLLKPAEGIK

SEQ ID NO: 3321 - protein, 24 aa, Homo Sapien
DLVIEPDVKPAFSSYSVQVGQDLK

SEQ ID NO: 3322 - protein, 16 aa, Homo Sapien
VPEIKPAIPLPAPEPK

SEQ ID NO: 3323 - protein, 20 aa, Homo Sapien
VPELPEKPAPEEVAPVPIPK

SEQ ID NO: 3324 - protein, 13 aa, Homo Sapien
EAAVLYKPAVSTK

SEQ ID NO: 3325 - protein, 16 aa, Homo Sapien
TASIEIVTLDKPDPPK

SEQ ID NO: 3326 - protein, 18 aa, Homo Sapien
VGLGEATSVPGTVKPEDK

SEQ ID NO: 3327 - protein, 13 aa, Homo Sapien
LNWTKPEHDGGAK

SEQ ID NO: 3328 - protein, 8 aa, Homo Sapien
KPELPPVK

SEQ ID NO: 3329 - protein, 16 aa, Homo Sapien
MPVDPPGKPEVIDVTK

SEQ ID NO: 3330 - protein, 17 aa, Homo Sapien
FGPPGPPEKPEVSNVTK

SEQ ID NO: 3331 - protein, 28 aa, Homo Sapien
LTNSAGEAIETLNVIVLDKPGPPTGPVK

SEQ ID NO: 3332 - protein, 21 aa, Homo Sapien
DSSGALIVQEPPSFVTKPGSK

SEQ ID NO: 3333 - protein, 15 aa, Homo Sapien
DSALVTWNKPHDGGK

SEQ ID NO: 3334 - protein, 11 aa, Homo Sapien
WSKPHYDGGAK

SEQ ID NO: 3335 - protein, 26 aa, Homo Sapien
SASLAWGKPHYDGGLEITGYVVEHQK

SEQ ID NO: 3336 - protein, 9 aa, Homo Sapien
EFKPIEVLK

SEQ ID NO: 3337 - protein, 11 aa, Homo Sapien
GKPIPDVVWSK

SEQ ID NO: 3338 - protein, 17 aa, Homo Sapien
VDADIYGKPIPTIQWIK

SEQ ID NO: 3339 - protein, 25 aa, Homo Sapien
DPFGPPDAPDKPIVEDVTSNSMLVK

SEQ ID NO: 3340 - protein, 19 aa, Homo Sapien
SSVSLAWSKPIYDGGAPVK

SEQ ID NO: 3341 - protein, 22 aa, Homo Sapien
GKPLILEGTFTGTPPISVTWKK

SEQ ID NO: 3342 - protein, 19 aa, Homo Sapien
AGDTIVLNAISILGKPLPK

SEQ ID NO: 3343 - protein, 25 aa, Homo Sapien
TADQDLVVDVGKPLTMVVPYDAYPK

SEQ ID NO: 3344 - protein, 23 aa, Homo Sapien
SSISVILTVEAVEHQVKPMFVEK

SEQ ID NO: 3345 - protein, 12 aa, Homo Sapien
SSISLGWKPPAK

SEQ ID NO: 3346 - protein, 25 aa, Homo Sapien
DHMTVSWKPPADDGGSPITGYLLEK

SEQ ID NO: 3347 - protein, 25 aa, Homo Sapien
NSAVISWKPPADDGGSWITNYVVEK

SEQ ID NO: 3348 - protein, 17 aa, Homo Sapien
DYMVISWKPPLDDGGSK

SEQ ID NO: 3349 - protein, 33 aa, Homo Sapien
QPPDPPVDVEVHNPTAEAMTITWKPPLYDGGSK

SEQ ID NO: 3350 - protein, 12 aa, Homo Sapien
KPPPPTTLIPAK

SEQ ID NO: 3351 - protein, 25 aa, Homo Sapien
TIKPPPVEPEPTPIAAPVTVPVVGK

SEQ ID NO: 3352 - protein, 26 aa, Homo Sapien
TIKPPPVEPEPTPIAAPVTVPVVGKK

SEQ ID NO: 3353 - protein, 13 aa, Homo Sapien
LAENLAGPGKPSK

SEQ ID NO: 3354 - protein, 14 aa, Homo Sapien
VLAENLAGPGKPSK

SEQ ID NO: 3355 - protein, 20 aa, Homo Sapien
AVNAAGVSKPSATVGPVTVK

SEQ ID NO: 3356 - protein, 19 aa, Homo Sapien
NAAGAISKPSDSTGPITAK

SEQ ID NO: 3357 - protein, 16 aa, Homo Sapien
FGLSKPSEPSEPTITK

SEQ ID NO: 3358 - protein, 20 aa, Homo Sapien
VFAENLAGLSKPSPSSDPIK

SEQ ID NO: 3359 - protein, 16 aa, Homo Sapien
APPVFTQKPSPVGALK

SEQ ID NO: 3360 - protein, 18 aa, Homo Sapien
DIEIKPSVELPFHTFNVK

SEQ ID NO: 3361 - protein, 16 aa, Homo Sapien
NETVIEKPTDALQITK

SEQ ID NO: 3362 - protein, 13 aa, Homo Sapien
AVSPTETKPTPTE

SEQ ID NO: 3363 - protein, 14 aa, Homo Sapien
AVSPTETKPTPTEK

SEQ ID NO: 3364 - protein, 22 aa, Homo Sapien
VSAENEIGIGDPSPPSKPVFAK

SEQ ID NO: 3365 - protein, 27 aa, Homo Sapien
APEPISSKPVIVTGLQDTTVSSDSVAK

SEQ ID NO: 3366 - protein, 32 aa, Homo Sapien
DVVMTDTSLTEEQAGPGEPAAPYFITKPVVQK

SEQ ID NO: 3367 - protein, 9 aa, Homo Sapien
ADMILKQDK

SEQ ID NO: 3368 - protein, 27 aa, Homo Sapien
AEPTPLPQFPFADTPDTYKSEAGVEVK

SEQ ID NO: 3369 - protein, 12 aa, Homo Sapien
SAALEEKSLEEK

SEQ ID NO: 3370 - protein, 16 aa, Homo Sapien
EAEKTALSTIAVATAK

SEQ ID NO: 3371 - protein, 17 aa, Homo Sapien
NEGGESDWVKTEEVVVK

SEQ ID NO: 3372 - protein, 11 aa, Homo Sapien
SEAKTELSIPK

SEQ ID NO: 3373 - protein, 15 aa, Homo Sapien
KTGGSPITGYHLEFK

SEQ ID NO: 3374 - protein, 11 aa, Homo Sapien
DFKTHANLFVK

SEQ ID NO: 3375 - protein, 16 aa, Homo Sapien
SVSMQDEGKTHSITFK

SEQ ID NO: 3376 - protein, 15 aa, Homo Sapien
FKTTGLDEGLEYEFK

SEQ ID NO: 3377 - protein, 11 aa, Homo Sapien
KTWVHVSSEPK

SEQ ID NO: 3378 - protein, 14 aa, Homo Sapien
VLDTPGPPQDLKVK

SEQ ID NO: 3379 - protein, 30 aa, Homo Sapien
VTAENEYGIGLPAQTADPIKVAEVPQPPGK

SEQ ID NO: 3380 - protein, 15 aa, Homo Sapien
LDDIGEYTYKVATSK

SEQ ID NO: 3381 - protein, 18 aa, Homo Sapien
VTGYLIEMQKVDQHEWTK

SEQ ID NO: 3382 - protein, 21 aa, Homo Sapien
DAGEYTITATNPFGTKVEHVK

SEQ ID NO: 3383 - protein, 20 aa, Homo Sapien
SVNKVGASDPSDSSDPQIAK

SEQ ID NO: 3384 - protein, 18 aa, Homo Sapien
TPVQEEVIEVKVPAVHTK

SEQ ID NO: 3385 - protein, 14 aa, Homo Sapien
IEEPPPAKVPEAPK

SEQ ID NO: 3386 - protein, 11 aa, Homo Sapien
VPPPKVPEEPK

SEQ ID NO: 3387 - protein, 12 aa, Homo Sapien
EAPPAKVPEVPK

SEQ ID NO: 3388 - protein, 13 aa, Homo Sapien
VELTPLKVPGGEK

SEQ ID NO: 3389 - protein, 8 aa, Homo Sapien
KVPLVVPK

SEQ ID NO: 3390 - protein, 13 aa, Homo Sapien
AVPEEKVPVPIPK

SEQ ID NO: 3391 - protein, 11 aa, Homo Sapien
PEEKVPVPIPK

SEQ ID NO: 3392 - protein, 13 aa, Homo Sapien
EEGEFTDKVQIEK

SEQ ID NO: 3393 - protein, 10 aa, Homo Sapien
MEEEKVQVTK

SEQ ID NO: 3394 - protein, 18 aa, Homo Sapien
VLDTPGPVSDLKVSDVTK

SEQ ID NO: 3395 - protein, 13 aa, Homo Sapien
VSGTDLKVSWYSK

SEQ ID NO: 3396 - protein, 19 aa, Homo Sapien
LSWTQVSTEVQALNYKVTK

SEQ ID NO: 3397 - protein, 14 aa, Homo Sapien
LVPELTYKVTGLEK

SEQ ID NO: 3398 - protein, 8 aa, Homo Sapien
KVTVTWSK

SEQ ID NO: 3399 - protein, 13 aa, Homo Sapien
VSGIPPPTLKWEK

SEQ ID NO: 3400 - protein, 10 aa, Homo Sapien
HVDLKWEPPK

SEQ ID NO: 3401 - protein, 12 aa, Homo Sapien
GTEKWSIVAESK

SEQ ID NO: 3402 - protein, 19 aa, Homo Sapien
WEPPKYDGGSQVTNYILLK

SEQ ID NO: 3403 - protein, 15 aa, Homo Sapien
TLESGDKYDVIADGK

SEQ ID NO: 3404 - protein, 19 aa, Homo Sapien
AVNKYGIGEPLESDSVVAK

SEQ ID NO: 3405 - protein, 11 aa, Homo Sapien
ADHGKYIISAK

SEQ ID NO: 3406 - protein, 12 aa, Homo Sapien
NSDIIVPHKYPK

SEQ ID NO: 3407 - protein, 20 aa, Homo Sapien
SGGKYQISYLENSAHLTVLK

SEQ ID NO: 3408 - protein, 13 aa, Homo Sapien
NASVSDSGKYTIK

SEQ ID NO: 3409 - protein, 17 aa, Homo Sapien
NDAGKYTLTVENNSGSK

SEQ ID NO: 3410 - protein, 10 aa, Homo Sapien
AAEPPSPPGK

SEQ ID NO: 3411 - protein, 13 aa, Homo Sapien
ADAGIYTITLENK

SEQ ID NO: 3412 - protein, 17 aa, Homo Sapien
ADNSVGAVASSAVLVIK

SEQ ID NO: 3413 - protein, 10 aa, Homo Sapien
ADSSSILIIK

SEQ ID NO: 3414 - protein, 20 aa, Homo Sapien
AENSVGEVSASTFLTVQEQK

SEQ ID NO: 3415 - protein, 19 aa, Homo Sapien
AEPTPLPQFPFADTPDTYK

SEQ ID NO: 3416 - protein, 15 aa, Homo Sapien
AGDTIVLNAISILGK

SEQ ID NO: 3417 - protein, 12 aa, Homo Sapien
AGEDVQVLIPFK

SEQ ID NO: 3418 - protein, 18 aa, Homo Sapien
AGEPVHIPADVTGLPMPK

SEQ ID NO: 3419 - protein, 16 aa, Homo Sapien
AGIGPPSEASDSVLMK

SEQ ID NO: 3420 - protein, 18 aa, Homo Sapien
AGVGEHADVPGPIIVEEK

SEQ ID NO: 3421 - protein, 30 aa, Homo Sapien
AGVSDPSEILGPLTADDAFVEPTMDLSAFK

SEQ ID NO: 3422 - protein, 16 aa, Homo Sapien
AIIDTTESYSLLIVDK

SEQ ID NO: 3423 - protein, 15 aa, Homo Sapien
AIVEGFQPISVVWLK

SEQ ID NO: 3424 - protein, 21 aa, Homo Sapien
ALDPFTVPSPPTSLEITSVTK

SEQ ID NO: 3425 - protein, 23 aa, Homo Sapien
AMLSWEPPLEDGGSEITNYIVDK

SEQ ID NO: 3426 - protein, 9 aa, Homo Sapien
AMTLGVSYK

SEQ ID NO: 3427 - protein, 10 aa, Homo Sapien
APEIIDVSSK

SEQ ID NO: 3428 - protein, 9 aa, Homo Sapien
APEVTTVTK

SEQ ID NO: 3429 - protein, 18 aa, Homo Sapien
ASEAPSPPDSLNIMDITK

SEQ ID NO: 3430 - protein, 12 aa, Homo Sapien
ASQTPGPVVDLK

SEQ ID NO: 3431 - protein, 9 aa, Homo Sapien
ATDSEVWHK

SEQ ID NO: 3432 - protein, 17 aa, Homo Sapien
ATNGSGQATSTAELLVK

SEQ ID NO: 3433 - protein, 18 aa, Homo Sapien
ATSTAELLVQGEEEVPAK

SEQ ID NO: 3434 - protein, 19 aa, Homo Sapien
ATSTAELLVQGEEEVPAKK

SEQ ID NO: 3435 - protein, 16 aa, Homo Sapien
ATSYTITGLTENQEYK

SEQ ID NO: 3436 - protein, 9 aa, Homo Sapien
AVDPIDAPK

SEQ ID NO: 3437 - protein, 9 aa, Homo Sapien
AVIVQYPFK

SEQ ID NO: 3438 - protein, 20 aa, Homo Sapien
AVNAIGVSEPSEISENVVAK

SEQ ID NO: 3439 - protein, 28 aa, Homo Sapien
AVNEIGESEPSLPLNVVIQDDEVPPTIK

SEQ ID NO: 3440 - protein, 20 aa, Homo Sapien
AVNIAGIGEPGEVTDVIEMK

SEQ ID NO: 3441 - protein, 25 aa, Homo Sapien
AVPPEEIPPVVAPPIPLLLPTPEEK

SEQ ID NO: 3442 - protein, 10 aa, Homo Sapien
AVVQEEISQK

SEQ ID NO: 3443 - protein, 19 aa, Homo Sapien
DAAYPPGPPSNPHVTDTTK

SEQ ID NO: 3444 - protein, 20 aa, Homo Sapien
DAAYPPGPPSNPHVTDTTKK

SEQ ID NO: 3445 - protein, 17 aa, Homo Sapien
DDENLQTSFVDNVATLK

SEQ ID NO: 3446 - protein, 17 aa, Homo Sapien
DDGGQYGITVANVVGQK

SEQ ID NO: 3447 - protein, 14 aa, Homo Sapien
DDGGSEITNYILEK

SEQ ID NO: 3448 - protein, 10 aa, Homo Sapien
DDQEISASEK

SEQ ID NO: 3449 - protein, 13 aa, Homo Sapien
DDTSTSLELFAAK

SEQ ID NO: 3450 - protein, 10 aa, Homo Sapien
DDVELVSGPK

SEQ ID NO: 3451 - protein, 11 aa, Homo Sapien
DDVVAPDLDLK

SEQ ID NO: 3452 - protein, 21 aa, Homo Sapien
DENVPPIVEFGPEYFDGLIIK

SEQ ID NO: 3453 - protein, 10 aa, Homo Sapien
DGFNITTSEK

SEQ ID NO: 3454 - protein, 14 aa, Homo Sapien
DGGGTEITNYIVEK

SEQ ID NO: 3455 - protein, 23 aa, Homo Sapien
DGGSPITGYLVEYQEEGTQDWIK

SEQ ID NO: 3456 - protein, 8 aa, Homo Sapien
DGNHLYLK

SEQ ID NO: 3457 - protein, 9 aa, Homo Sapien
DIENQTVLK

SEQ ID NO: 3458 - protein, 10 aa, Homo Sapien
DLSLVVTGLK

SEQ ID NO: 3459 - protein, 12 aa, Homo Sapien
DPIAPPGPPFPK

SEQ ID NO: 3460 - protein, 13 aa, Homo Sapien
DPQYPPGPPAFPK

SEQ ID NO: 3461 - protein, 17 aa, Homo Sapien
DQMLVQWHEPVNDGGTK

SEQ ID NO: 3462 - protein, 17 aa, Homo Sapien
DSAFLVWEPPIIDGGAK

SEQ ID NO: 3463 - protein, 25 aa, Homo Sapien
DSAYVTWEPPIIDGGSPIINYVVQK

SEQ ID NO: 3464 - protein, 17 aa, Homo Sapien
DSGAYTLTATNPGGFAK

SEQ ID NO: 3465 - protein, 19 aa, Homo Sapien
DSGYYSLTAENSSGTDTQK

SEQ ID NO: 3466 - protein, 20 aa, Homo Sapien
DSPNVQTSFLDNTATLNIFK

SEQ ID NO: 3467 - protein, 25 aa, Homo Sapien
DSVTITWEIPTIDGGAPVNNYIVEK

SEQ ID NO: 3468 - protein, 19 aa, Homo Sapien
DTFTTPGPPYALAVVDVTK

SEQ ID NO: 3469 - protein, 16 aa, Homo Sapien
DTGEYQITVSNAAGSK

SEQ ID NO: 3470 - protein, 12 aa, Homo Sapien
DTWGVVSSGSSK

SEQ ID NO: 3471 - protein, 15 aa, Homo Sapien
DVASAQWSPLSATSK

SEQ ID NO: 3472 - protein, 13 aa, Homo Sapien
DVTAEDSASIMVK

SEQ ID NO: 3473 - protein, 24 aa, Homo Sapien
DVTALENATVAFEVSVSHDTVPVK

SEQ ID NO: 3474 - protein, 12 aa, Homo Sapien
DVWMPVTSASAK

SEQ ID NO: 3475 - protein, 13 aa, Homo Sapien
EALESSLELYLVK

SEQ ID NO: 3476 - protein, 8 aa, Homo Sapien
EANVIWSK

SEQ ID NO: 3477 - protein, 10 aa, Homo Sapien
EEQLLSTGFK

SEQ ID NO: 3478 - protein, 11 aa, Homo Sapien
ELEPVQSAINK

SEQ ID NO: 3479 - protein, 12 aa, Homo Sapien
ELEPVQSAINKK

SEQ ID NO: 3480 - protein, 9 aa, Homo Sapien
ELSSTAQLK

SEQ ID NO: 3481 - protein, 17 aa, Homo Sapien
ENMATLMVLEPAVIVEK

SEQ ID NO: 3482 - protein, 25 aa, Homo Sapien
EPATITEEAVSIDVTQGDPATLQVK

SEQ ID NO: 3483 - protein, 20 aa, Homo Sapien
EPGHLEESYAQQTTLEYGYK

SEQ ID NO: 3484 - protein, 7 aa, Homo Sapien
EQLLPPK

SEQ ID NO: 3485 - protein, 9 aa, Homo Sapien
EQVQITQEK

SEQ ID NO: 3486 - protein, 19 aa, Homo Sapien
ESASFDAEISEADIPGQWK

SEQ ID NO: 3487 - protein, 19 aa, Homo Sapien
ESAVLSWDVPENDGGAPVK

SEQ ID NO: 3488 - protein, 15 aa, Homo Sapien
ESGTTAWQLVNSSVK

SEQ ID NO: 3489 - protein, 15 aa, Homo Sapien
ESLSSYEHSASAEMK

SEQ ID NO: 3490 - protein, 9 aa, Homo Sapien
ETQAVNWTK

SEQ ID NO: 3491 - protein, 8 aa, Homo Sapien
ETSQTNWK

SEQ ID NO: 3492 - protein, 20 aa, Homo Sapien
EVQLQTTIEGAEPISVVWFK

SEQ ID NO: 3493 - protein, 16 aa, Homo Sapien
EVTEITEIEEEYEISK

SEQ ID NO: 3494 - protein, 11 aa, Homo Sapien
EVTLDDISQIK

SEQ ID NO: 3495 - protein, 12 aa, Homo Sapien
FDEVTAEAMTLK

SEQ ID NO: 3496 - protein, 12 aa, Homo Sapien
FVMTIENPAGKK

SEQ ID NO: 3497 - protein, 15 aa, Homo Sapien
GAGEEEEIDIMELLK

SEQ ID NO: 3498 - protein, 15 aa, Homo Sapien
GEDEVVTSSHLAVHK

SEQ ID NO: 3499 - protein, 12 aa, Homo Sapien
GEQTWSHAGISK

SEQ ID NO: 3500 - protein, 14 aa, Homo Sapien
GLSDPVTIGPITVK

SEQ ID NO: 3501 - protein, 9 aa, Homo Sapien
GMHISSQIK

SEQ ID NO: 3502 - protein, 12 aa, Homo Sapien
GSDQWTHITTVK

SEQ ID NO: 3503 - protein, 11 aa, Homo Sapien
GSEPISVTWMK

SEQ ID NO: 3504 - protein, 11 aa, Homo Sapien
GTPPFSVSWFK

SEQ ID NO: 3505 - protein, 25 aa, Homo Sapien
GTVTLLWDPPLIDGGSPIINYVIEK

SEQ ID NO: 3506 - protein, 12 aa, Homo Sapien
GYDEIPAEPNDK

SEQ ID NO: 3507 - protein, 15 aa, Homo Sapien
GYIVEMQEEGTTDWK

SEQ ID NO: 3508 - protein, 21 aa, Homo Sapien
HGETSASASLLEEADYELLMK

SEQ ID NO: 3509 - protein, 8 aa, Homo Sapien
HHITFINK

SEQ ID NO: 3510 - protein, 9 aa, Homo Sapien
HMQITQEEK

SEQ ID NO: 3511 - protein, 11 aa, Homo Sapien
IADFSTNLVNK

SEQ ID NO: 3512 - protein, 10 aa, Homo Sapien
IATLEIPLAK

SEQ ID NO: 3513 - protein, 15 aa, Homo Sapien
IAVPITVITLGPPSK

SEQ ID NO: 3514 - protein, 19 aa, Homo Sapien
IDSTVSQDSAWYTATAINK

SEQ ID NO: 3515 - protein, 10 aa, Homo Sapien
IEAEPIQFTK

SEQ ID NO: 3516 - protein, 9 aa, Homo Sapien
IENTTTVLK

SEQ ID NO: 3517 - protein, 10 aa, Homo Sapien
IEQEIEMEMK

SEQ ID NO: 3518 - protein, 15 aa, Homo Sapien
IGVGPPLDSTPTVAK

SEQ ID NO: 3519 - protein, 14 aa, Homo Sapien
IIGYVVDFLTEENK

SEQ ID NO: 3520 - protein, 9 aa, Homo Sapien
IIGYWVEKK

SEQ ID NO: 3521 - protein, 22 aa, Homo Sapien
IINVAPSDSGVYSFEVQNPVGK

SEQ ID NO: 3522 - protein, 7 aa, Homo Sapien
ILDLSEK

SEQ ID NO: 3523 - protein, 11 aa, Homo Sapien
ILGYIVEMQTK

SEQ ID NO: 3524 - protein, 20 aa, Homo Sapien
IMAENAAGISAPSPTSPFYK

SEQ ID NO: 3525 - protein, 14 aa, Homo Sapien
INVLDLIIPPSFTK

SEQ ID NO: 3526 - protein, 15 aa, Homo Sapien
INVLDLIIPPSFTKK

SEQ ID NO: 3527 - protein, 22 aa, Homo Sapien
ISFIDNIATLQLGSPEASNSGK

SEQ ID NO: 3528 - protein, 14 aa, Homo Sapien
ITFVENVATLQFAK

SEQ ID NO: 3529 - protein, 9 aa, Homo Sapien
ITIENVPKK

SEQ ID NO: 3530 - protein, 8 aa, Homo Sapien
ITNYIIEK

SEQ ID NO: 3531 - protein, 8 aa, Homo Sapien
ITNYILEK

SEQ ID NO: 3532 - protein, 8 aa, Homo Sapien
ITNYIVEK

SEQ ID NO: 3533 - protein, 8 aa, Homo Sapien
ITNYLLEK

SEQ ID NO: 3534 - protein, 8 aa, Homo Sapien
ITSYIVEK

SEQ ID NO: 3535 - protein, 8 aa, Homo Sapien
IVGYSIEK

SEQ ID NO: 3536 - protein, 11 aa, Homo Sapien
IVHYVVEALEK

SEQ ID NO: 3537 - protein, 9 aa, Homo Sapien
LAWALIEDK

SEQ ID NO: 3538 - protein, 14 aa, Homo Sapien
LAWTNVASEVQVTK

SEQ ID NO: 3539 - protein, 10 aa, Homo Sapien
LDDIGEYTYK

SEQ ID NO: 3540 - protein, 8 aa, Homo Sapien
LGVTSISK

SEQ ID NO: 3541 - protein, 7 aa, Homo Sapien
LIDISEK

SEQ ID NO: 3542 - protein, 7 aa, Homo Sapien
LIDLSEK

SEQ ID NO: 3543 - protein, 15 aa, Homo Sapien
LLFNTFTVLAGEDLK

SEQ ID NO: 3544 - protein, 16 aa, Homo Sapien
LLLQATPQFHPGYPLK

SEQ ID NO: 3545 - protein, 22 aa, Homo Sapien
LLQNSENITIENTEHYTHLVMK

SEQ ID NO: 3546 - protein, 15 aa, Homo Sapien
LPFNTYSIQAGEDLK

SEQ ID NO: 3547 - protein, 10 aa, Homo Sapien
LSDISTVVGK

SEQ ID NO: 3548 - protein, 11 aa, Homo Sapien
LSQTEPVTLIK

SEQ ID NO: 3549 - protein, 16 aa, Homo Sapien
LSWTQVSTEVQALNYK

SEQ ID NO: 3550 - protein, 13 aa, Homo Sapien
LTAPELDIDANFK

SEQ ID NO: 3551 - protein, 8 aa, Homo Sapien
LTIPAVTK

SEQ ID NO: 3552 - protein, 10 aa, Homo Sapien
LTVAGGAISK

SEQ ID NO: 3553 - protein, 21 aa, Homo Sapien
LTWFSPEDDGGSPITNYVIEK

SEQ ID NO: 3554 - protein, 18 aa, Homo Sapien
MAEILSGTESVPLTQVAK

SEQ ID NO: 3555 - protein, 17 aa, Homo Sapien
MDEVTADSITLSWGPPK

SEQ ID NO: 3556 - protein, 7 aa, Homo Sapien
MHVVWFK

SEQ ID NO: 3557 - protein, 14 aa, Homo Sapien
MVAQFPFGVPSEPK

SEQ ID NO: 3558 - protein, 16 aa, Homo Sapien
MYFVNSEAILDITDVK

SEQ ID NO: 3559 - protein, 19 aa, Homo Sapien
NAADSVSEPSESTGPIIVK

SEQ ID NO: 3560 - protein, 21 aa, Homo Sapien
NAAHEDGGIYSLTVENPAGSK

SEQ ID NO: 3561 - protein, 16 aa, Homo Sapien
NAFVTPGPPGIPEVTK

SEQ ID NO: 3562 - protein, 17 aa, Homo Sapien
NAMPEDIAEYAVEIEGK

SEQ ID NO: 3563 - protein, 10 aa, Homo Sapien
NEGGESDWVK

SEQ ID NO: 3564 - protein, 10 aa, Homo Sapien
NGVVLESNEK

SEQ ID NO: 3565 - protein, 8 aa, Homo Sapien
NIEVPETK

SEQ ID NO: 3566 - protein, 26 aa, Homo Sapien
NIVGEVGDVITIQVHDIPGPPTGPIK

SEQ ID NO: 3567 - protein, 14 aa, Homo Sapien
NLANIEVSETDTIK

SEQ ID NO: 3568 - protein, 10 aa, Homo Sapien
NNMVVVQGDK

SEQ ID NO: 3569 - protein, 19 aa, Homo Sapien
NSFTIPSPPGIPEEVGTGK

SEQ ID NO: 3570 - protein, 9 aa, Homo Sapien
NSITLAWGK

SEQ ID NO: 3571 - protein, 17 aa, Homo Sapien
NSVSLSWQQPAFDGGSK

SEQ ID NO: 3572 - protein, 10 aa, Homo Sapien
NTEFTVPDLK

SEQ ID NO: 3573 - protein, 9 aa, Homo Sapien
PAPEVTWTK

SEQ ID NO: 3574 - protein, 9 aa, Homo Sapien
PAPTIEWYK

SEQ ID NO: 3575 - protein, 14 aa, Homo Sapien
PGPPTNAHIVDTTK

SEQ ID NO: 3576 - protein, 16 aa, Homo Sapien
PIADGGSDISGYFLEK

SEQ ID NO: 3577 - protein, 10 aa, Homo Sapien
PIYDGGAPVK

SEQ ID NO: 3578 - protein, 21 aa, Homo Sapien
PMPETFWFHDGQQIVNDYTHK

SEQ ID NO: 3579 - protein, 7 aa, Homo Sapien
PNISWVK

SEQ ID NO: 3580 - protein, 11 aa, Homo Sapien
PSEPSEPTITK

SEQ ID NO: 3581 - protein, 16 aa, Homo Sapien
PVDDGGTEIEGYILEK

SEQ ID NO: 3582 - protein, 16 aa, Homo Sapien
QDAGTYTFQVQNNVGK

SEQ ID NO: 3583 - protein, 13 aa, Homo Sapien
QGEEEEWTTVSTK

SEQ ID NO: 3584 - protein, 19 aa, Homo Sapien
SDTGLYTITAVNNLGTASK

SEQ ID NO: 3585 - protein, 20 aa, Homo Sapien
SIATVEMVIDGAAGQQLPHK

SEQ ID NO: 3586 - protein, 9 aa, Homo Sapien
SIVHEEITK

SEQ ID NO: 3587 - protein, 21 aa, Homo Sapien
SLGDISDEELLLPIDDYLAMK

SEQ ID NO: 3588 - protein, 9 aa, Homo Sapien
SLSLQYSAK

SEQ ID NO: 3589 - protein, 8 aa, Homo Sapien
SLTTFVGK

SEQ ID NO: 3590 - protein, 14 aa, Homo Sapien
SNGGSPIQGYIIEK

SEQ ID NO: 3591 - protein, 10 aa, Homo Sapien
SPTPPSIAAK

SEQ ID NO: 3592 - protein, 19 aa, Homo Sapien
SQQEMLYQTQVTAFVQEPK

SEQ ID NO: 3593 - protein, 12 aa, Homo Sapien
SSADLEWSPPLK

SEQ ID NO: 3594 - protein, 9 aa, Homo Sapien
SSVSLSWGK

SEQ ID NO: 3595 - protein, 17 aa, Homo Sapien
STVSLIWSAPAYDGGSK

SEQ ID NO: 3596 - protein, 16 aa, Homo Sapien
STYLNSEPTVAQYPFK

SEQ ID NO: 3597 - protein, 8 aa, Homo Sapien
SWQVISEK

SEQ ID NO: 3598 - protein, 12 aa, Homo Sapien
TALSTIAVATAK

SEQ ID NO: 3599 - protein, 9 aa, Homo Sapien
TDGGQYILK

SEQ ID NO: 3600 - protein, 11 aa, Homo Sapien
TEAYAVSSFKK

SEQ ID NO: 3601 - protein, 15 aa, Homo Sapien
TEIISTDNHTLLTVK

SEQ ID NO: 3602 - protein, 14 aa, Homo Sapien
TFIQDHLVSLQILK

SEQ ID NO: 3603 - protein, 8 aa, Homo Sapien
THANLFVK

SEQ ID NO: 3604 - protein, 11 aa, Homo Sapien
TNLQFMGQAFK

SEQ ID NO: 3605 - protein, 11 aa, Homo Sapien
TPVQEEVIEVK

SEQ ID NO: 3606 - protein, 17 aa, Homo Sapien
TQASTVATGPEVPPPWK

SEQ ID NO: 3607 - protein, 22 aa, Homo Sapien
TSGDTSLQGSFSSQSVQMSASK

SEQ ID NO: 3608 - protein, 17 aa, Homo Sapien
TSVTLTWDPPLLDGGSK

SEQ ID NO: 3609 - protein, 13 aa, Homo Sapien
TTGLDEGLEYEFK

SEQ ID NO: 3610 - protein, 10 aa, Homo Sapien
TTPATLALEK

SEQ ID NO: 3611 - protein, 9 aa, Homo Sapien
TVLISSEGK

SEQ ID NO: 3612 - protein, 8 aa, Homo Sapien
TVTSLSIK

SEQ ID NO: 3613 - protein, 22 aa, Homo Sapien
VAAENAIGQSDYTEIEDSVLAK

SEQ ID NO: 3614 - protein, 21 aa, Homo Sapien
VAAENMYGVGEPVQASPITAK

SEQ ID NO: 3615 - protein, 10 aa, Homo Sapien
VAEVPQPPGK

SEQ ID NO: 3616 - protein, 15 aa, Homo Sapien
VAGSSPISVAWFHEK

SEQ ID NO: 3617 - protein, 25 aa, Homo Sapien
VASIEIGPVSGQIMHAVGEEGGHVK

SEQ ID NO: 3618 - protein, 9 aa, Homo Sapien
VAVPVPVAK

SEQ ID NO: 3619 - protein, 11 aa, Homo Sapien
VEAMGMSSEAK

SEQ ID NO: 3620 - protein, 16 aa, Homo Sapien
VGASDPSDSSDPQIAK

SEQ ID NO: 3621 - protein, 8 aa, Homo Sapien
VGDEAWIK

SEQ ID NO: 3622 - protein, 15 aa, Homo Sapien
VGETAPGFVYSEYEK

SEQ ID NO: 3623 - protein, 11 aa, Homo Sapien
VIQAPSETHIK

SEQ ID NO: 3624 - protein, 20 aa, Homo Sapien
VLASNEYGIGLPAETTEPVK

SEQ ID NO: 3625 - protein, 22 aa, Homo Sapien
VLAVNAAGESDPAHVPEPVLVK

SEQ ID NO: 3626 - protein, 12 aa, Homo Sapien
VLDQNIPPSFTK

SEQ ID NO: 3627 - protein, 14 aa, Homo Sapien
VLDTPGPPGPITFK

SEQ ID NO: 3628 - protein, 12 aa, Homo Sapien
VLDTPGPPQDLK

SEQ ID NO: 3629 - protein, 18 aa, Homo Sapien
VLDTPGPPTNITVQDVTK

SEQ ID NO: 3630 - protein, 12 aa, Homo Sapien
VLDTPGPVSDLK

SEQ ID NO: 3631 - protein, 9 aa, Homo Sapien
VLGVPVIAK

SEQ ID NO: 3632 - protein, 9 aa, Homo Sapien
VLISEEVKK

SEQ ID NO: 3633 - protein, 20 aa, Homo Sapien
VMAENEFGVGVPVETVDAVK

SEQ ID NO: 3634 - protein, 20 aa, Homo Sapien
VMAENEYGIGEPTETTEPVK

SEQ ID NO: 3635 - protein, 9 aa, Homo Sapien
VMDVPGPPK

SEQ ID NO: 3636 - protein, 15 aa, Homo Sapien
VNVEETATSTVLHIK

SEQ ID NO: 3637 - protein, 19 aa, Homo Sapien
VPAPVEIPVTPPTLVSGLK

SEQ ID NO: 3638 - protein, 22 aa, Homo Sapien
VSAQNTFGISDPLEVSSVVIIK

SEQ ID NO: 3639 - protein, 36 aa, Homo Sapien
VSAVNAAGEGPPGETQPVTVAEPQEPPAVELDVSVK

SEQ ID NO: 3640 - protein, 16 aa, Homo Sapien
VSGENEFGVGIPAETK

SEQ ID NO: 3641 - protein, 23 aa, Homo Sapien
VSGSAPISVGWFQDGNEIVSGPK

SEQ ID NO: 3642 - protein, 8 aa, Homo Sapien
VSLQYTGK

SEQ ID NO: 3643 - protein, 10 aa, Homo Sapien
VSVFNLHITK

SEQ ID NO: 3644 - protein, 13 aa, Homo Sapien
VSVYSVDVITPLK

SEQ ID NO: 3645 - protein, 15 aa, Homo Sapien
VSWYLDGNEITAIQK

SEQ ID NO: 3646 - protein, 13 aa, Homo Sapien
VTAENPEGVIEHK

SEQ ID NO: 3647 - protein, 7 aa, Homo Sapien
VTVTWSK

SEQ ID NO: 3648 - protein, 11 aa, Homo Sapien
VYAENAAGVGK

SEQ ID NO: 3649 - protein, 20 aa, Homo Sapien
WEPPLDDGGSEIINYTLEKK

SEQ ID NO: 3650 - protein, 9 aa, Homo Sapien
WTTDGSEIK

SEQ ID NO: 3651 - protein, 15 aa, Homo Sapien
YGIGEPLESDSVVAK

SEQ ID NO: 3652 - protein, 13 aa, Homo Sapien
YGTDHTSATLIVK

SEQ ID NO: 3653 - protein, 15 aa, Homo Sapien
YGVGDPVFTEPAIAK

SEQ ID NO: 3654 - protein, 25 aa, Homo Sapien
YGVGEPLESEPVLAVNPYGPPDPPK

SEQ ID NO: 3655 - protein, 13 aa, Homo Sapien
YGVGEPLESVAIK

SEQ ID NO: 3656 - protein, 15 aa, Homo Sapien
YGVSQPLVSSIIVAK

SEQ ID NO: 3657 - protein, 16 aa, Homo Sapien
YQISYLENSAHLTVLK

SEQ ID NO: 3658 - protein, 12 aa, Homo Sapien
YSLTLVNPAGEK

SEQ ID NO: 3659 - protein, 13 aa, Homo Sapien
YTFYAGENMTSGK

SEQ ID NO: 3660 - protein, 12 aa, Homo Sapien
YTLTVENNSGSK

SEQ ID NO: 3661 - protein, 13 aa, Homo Sapien
YTVVAGGNVSTAK

SEQ ID NO: 3662 - protein, 25 aa, Homo Sapien
VVGKPGIPTGPIKFDEVTAEAMTLK

SEQ ID NO: 3663 - protein, 18 aa, Homo Sapien
AGTKIELPATVTGKPEPK

SEQ ID NO: 3664 - protein, 17 aa, Homo Sapien
NTATIKWEKPESDGGSK

SEQ ID NO: 3665 - protein, 14 aa, Homo Sapien
LKVLDKPGPPASVK

SEQ ID NO: 3666 - protein, 18 aa, Homo Sapien
AGSNLKVDIPISGKPLPK

SEQ ID NO: 3667 - protein, 12 aa, Homo Sapien
KHIAIAWKPPEK

SEQ ID NO: 3668 - protein, 11 aa, Homo Sapien
GKPKPSISWLK

SEQ ID NO: 3669 - protein, 23 aa, Homo Sapien
STEPILIKDPIDPPWPPGKPTVK

SEQ ID NO: 3670 - protein, 19 aa, Homo Sapien
AENKIGTGPPTESKPVIAK

SEQ ID NO: 3671 - protein, 18 aa, Homo Sapien
TEEVVVKEDLQKPVLDLK

SEQ ID NO: 3672 - protein, 23 aa, Homo Sapien
VQILDKPGPPGGPIEFKTVTAEK

SEQ ID NO: 3673 - protein, 31 aa, Homo Sapien
FSFHDNTAFLEISQLEGTDSGTYTCSATNKA

SEQ ID NO: 3674 - protein, 21 aa, Homo Sapien
VLAENEIGIGEPCETTEPVKA

SEQ ID NO: 3675 - protein, 16 aa, Homo Sapien
YGTDHTSATLIVKDEK

SEQ ID NO: 3676 - protein, 10 aa, Homo Sapien
TKDELLHWTK

SEQ ID NO: 3677 - protein, 14 aa, Homo Sapien
AVPVPTVSWHKDGK

SEQ ID NO: 3678 - protein, 16 aa, Homo Sapien
VAGTPELSVEWYKDGK

SEQ ID NO: 3679 - protein, 13 aa, Homo Sapien
WFKDGEEIVPSPK

SEQ ID NO: 3680 - protein, 11 aa, Homo Sapien
ISWVKDGEPLK

SEQ ID NO: 3681 - protein, 19 aa, Homo Sapien
WTVPEKDGGSPITNYIVEK

SEQ ID NO: 3682 - protein, 13 aa, Homo Sapien
IVEPLKDIETMEK

SEQ ID NO: 3683 - protein, 17 aa, Homo Sapien
KDSGDYTITAENSSGSK

SEQ ID NO: 3684 - protein, 18 aa, Homo Sapien
KDSVTLSWEPPLIDGGAK

SEQ ID NO: 3685 - protein, 13 aa, Homo Sapien
GWQTVDTTVKDTK

SEQ ID NO: 3686 - protein, 11 aa, Homo Sapien
LSSTVKDTNFK

SEQ ID NO: 3687 - protein, 11 aa, Homo Sapien
FLTPLKDVTAK

SEQ ID NO: 3688 - protein, 14 aa, Homo Sapien
ITQFVVPDLQTKEK

SEQ ID NO: 3689 - protein, 17 aa, Homo Sapien
MAHEGALTGVTTDQKEK

SEQ ID NO: 3690 - protein, 16 aa, Homo Sapien
YGQEQWEEGDLYDKEK

SEQ ID NO: 3691 - protein, 15 aa, Homo Sapien
ISWYKEEQLLSTGFK

SEQ ID NO: 3692 - protein, 13 aa, Homo Sapien
LVVTGLKEGAFYK

SEQ ID NO: 3693 - protein, 13 aa, Homo Sapien
NVAGTKEGTISIK

SEQ ID NO: 3694 - protein, 9 aa, Homo Sapien
ISWYKEHTK

SEQ ID NO: 3695 - protein, 16 aa, Homo Sapien
VKELPLIFITPLSDVK

SEQ ID NO: 3696 - protein, 15 aa, Homo Sapien
AEAEWFKENEPLSTK

SEQ ID NO: 3697 - protein, 11 aa, Homo Sapien
LFVKEPATFVK

SEQ ID NO: 3698 - protein, 13 aa, Homo Sapien
ATLFVKEPPQFIK

SEQ ID NO: 3699 - protein, 11 aa, Homo Sapien
VALKEPPSFIK

SEQ ID NO: 3700 - protein, 20 aa, Homo Sapien
VIVKEPPVFSSFPPIVETLK

SEQ ID NO: 3701 - protein, 16 aa, Homo Sapien
EAEGVYEAKEQLLPPK

SEQ ID NO: 3702 - protein, 19 aa, Homo Sapien
VSAVNHYGKGEPVQSEPVK

SEQ ID NO: 3703 - protein, 14 aa, Homo Sapien
EANVIWSKGPDIIK

SEQ ID NO: 3704 - protein, 14 aa, Homo Sapien
QKGSDFWVEAGHTK

SEQ ID NO: 3705 - protein, 13 aa, Homo Sapien
LKGSPVIQVTWFK

SEQ ID NO: 3706 - protein, 10 aa, Homo Sapien
VKGTDQVLVK

SEQ ID NO: 3707 - protein, 13 aa, Homo Sapien
IKGVPFPTLTWFK

SEQ ID NO: 3708 - protein, 11 aa, Homo Sapien
KGWQTVDTTVK

SEQ ID NO: 3709 - protein, 19 aa, Homo Sapien
GIPPKIEALPSDISIDEGK

SEQ ID NO: 3710 - protein, 15 aa, Homo Sapien
DVKLEDAGEVQLTAK

SEQ ID NO: 3711 - protein, 10 aa, Homo Sapien
AKLELAAAPK

SEQ ID NO: 3712 - protein, 9 aa, Homo Sapien
KLEVTEMTK

SEQ ID NO: 3713 - protein, 16 aa, Homo Sapien
LTMKNDHISAHLEVPK

SEQ ID NO: 3714 - protein, 8 aa, Homo Sapien
IKNYIVEK

SEQ ID NO: 3715 - protein, 15 aa, Homo Sapien
AEDPVFLPSPPSKPK

SEQ ID NO: 3716 - protein, 10 aa, Homo Sapien
GKPAPSVSWK

SEQ ID NO: 3717 - protein, 26 aa, Homo Sapien
SSVSLSWGKPAYDGGSPIIGYLVEVK

SEQ ID NO: 3718 - protein, 15 aa, Homo Sapien
IPFSGKPDPVITWQK

SEQ ID NO: 3719 - protein, 17 aa, Homo Sapien
NSVSLSWTKPEHDGGSK

SEQ ID NO: 3720 - protein, 18 aa, Homo Sapien
AGSDLVLDAAVGGKPEPK

SEQ ID NO: 3721 - protein, 14 aa, Homo Sapien
IELPATVTGKPEPK

SEQ ID NO: 3722 - protein, 11 aa, Homo Sapien
WEKPESDGGSK

SEQ ID NO: 3723 - protein, 11 aa, Homo Sapien
WAKPEYTGGFK

SEQ ID NO: 3724 - protein, 11 aa, Homo Sapien
GKPFPEVAWTK

SEQ ID NO: 3725 - protein, 13 aa, Homo Sapien
VVGKPGIPTGPIK

SEQ ID NO: 3726 - protein, 21 aa, Homo Sapien
VLDKPGPPAGPLEINGLTAEK

SEQ ID NO: 3727 - protein, 12 aa, Homo Sapien
VLDKPGPPASVK

SEQ ID NO: 3728 - protein, 17 aa, Homo Sapien
VQILDKPGPPGGPIEFK

SEQ ID NO: 3729 - protein, 15 aa, Homo Sapien
VIILDKPGPPTGPIK

SEQ ID NO: 3730 - protein, 11 aa, Homo Sapien
GPFVETPKPIK

SEQ ID NO: 3731 - protein, 16 aa, Homo Sapien
EVELLKPIEDVTIYEK

SEQ ID NO: 3732 - protein, 14 aa, Homo Sapien
VSAENQFGISKPLK

SEQ ID NO: 3733 - protein, 12 aa, Homo Sapien
VDIPISGKPLPK

SEQ ID NO: 3734 - protein, 11 aa, Homo Sapien
NTVHLSWKPPK

SEQ ID NO: 3735 - protein, 11 aa, Homo Sapien
HIAIAWKPPEK

SEQ ID NO: 3736 - protein, 16 aa, Homo Sapien
AMTITWKPPLYDGGSK

SEQ ID NO: 3737 - protein, 22 aa, Homo Sapien
VHELAAEFISKPQNLEILEGEK

SEQ ID NO: 3738 - protein, 14 aa, Homo Sapien
VSAENIVGIGKPSK

SEQ ID NO: 3739 - protein, 14 aa, Homo Sapien
IGVGKPSAATPFVK

SEQ ID NO: 3740 - protein, 10 aa, Homo Sapien
ITEKPSPPEK

SEQ ID NO: 3741 - protein, 14 aa, Homo Sapien
FILNVQSKPTAEVK

SEQ ID NO: 3742 - protein, 8 aa, Homo Sapien
PKPTVTWK

SEQ ID NO: 3743 - protein, 15 aa, Homo Sapien
IGTGPPTESKPVIAK

SEQ ID NO: 3744 - protein, 40 aa, Homo Sapien
IPGPPGKPVIYNVTSDGMSLTWDAPVYDGGSEVTGFHVEK

SEQ ID NO: 3745 - protein, 11 aa, Homo Sapien
EDLQKPVLDLK

SEQ ID NO: 3746 - protein, 28 aa, Homo Sapien
FSPPSPPGKPVVTDITENAATVSWTLPK

SEQ ID NO: 3747 - protein, 25 aa, Homo Sapien
NEITLQWTKPVYDGGSMITGYIVEK

SEQ ID NO: 3748 - protein, 10 aa, Homo Sapien
VNKTPIADLK

SEQ ID NO: 3749 - protein, 10 aa, Homo Sapien
LNKTPIPQTK

SEQ ID NO: 3750 - protein, 11 aa, Homo Sapien
KTWSTVTPEVK

SEQ ID NO: 3751 - protein, 16 aa, Homo Sapien
TADPIKVAEVPQPPGK

SEQ ID NO: 3752 - protein, 12 aa, Homo Sapien
EAPPAKVPEVQK

SEQ ID NO: 3753 - protein, 18 aa, Homo Sapien
VLDTPSPPVNLKVTEITK

SEQ ID NO: 3754 - protein, 13 aa, Homo Sapien
VGGDPIPNVKWTK

SEQ ID NO: 3755 - protein, 12 aa, Homo Sapien
NTADLKWTVPEK

SEQ ID NO: 3756 - protein, 7 aa, Homo Sapien
KYDIISK

SEQ ID NO: 3757 - protein, 14 aa, Homo Sapien
VSAENKYGVGEGLK

SEQ ID NO: 3758 - protein, 21 aa, Homo Sapien
IMAVNKYGVGEPLESAPVLMK

SEQ ID NO: 3759 - protein, 16 aa, Homo Sapien
NEEAIFDSSKYIILQK

SEQ ID NO: 3760 - protein, 18 aa, Homo Sapien
NDTGKYILTIENGVGEPK

SEQ ID NO: 3761 - protein, 17 aa, Homo Sapien
FDSGKYILTVENSSGSK

SEQ ID NO: 3762 - protein, 17 aa, Homo Sapien
DDSGKYSLTLVNPAGEK

SEQ ID NO: 3763 - protein, 11 aa, Homo Sapien
SDAGKYTITLK

SEQ ID NO: 3764 - protein, 17 aa, Homo Sapien
YDSGKYTLTLENSSGTK

SEQ ID NO: 3765 - protein, 11 aa, Homo Sapien
SDSGKYTLTVK

SEQ ID NO: 3766 - protein, 7 aa, Homo Sapien
KYTLTVK

SEQ ID NO: 3767 - protein, 10 aa, Homo Sapien
AAAHLTVIEK

SEQ ID NO: 3768 - protein, 13 aa, Homo Sapien
AADPIDPPGPPAK

SEQ ID NO: 3769 - protein, 9 aa, Homo Sapien
AAHLTVIEK

SEQ ID NO: 3770 - protein, 19 aa, Homo Sapien
AINIAGETSSHAFLLVQAK

SEQ ID NO: 3771 - protein, 12 aa, Homo Sapien
ALDPLHPPGPPK

SEQ ID NO: 3772 - protein, 12 aa, Homo Sapien
ALVGGTAPMTIK

SEQ ID NO: 3773 - protein, 15 aa, Homo Sapien
AMIATSETHTELVIK

SEQ ID NO: 3774 - protein, 10 aa, Homo Sapien
ANIAGATDVK

SEQ ID NO: 3775 - protein, 13 aa, Homo Sapien
ATGNPNPDIVWLK

SEQ ID NO: 3776 - protein, 17 aa, Homo Sapien
ATLTWTPPLEDGGSPIK

SEQ ID NO: 3777 - protein, 21 aa, Homo Sapien
ATNQGGSVSGTASLEVEVPAK

SEQ ID NO: 3778 - protein, 11 aa, Homo Sapien
AVPEAPTPVPK

SEQ ID NO: 3779 - protein, 11 aa, Homo Sapien
AVPVPTVSWHK

SEQ ID NO: 3780 - protein, 16 aa, Homo Sapien
DAGEYTITATNPFGTK

SEQ ID NO: 3781 - protein, 14 aa, Homo Sapien
DDGGSPVINYIVEK

SEQ ID NO: 3782 - protein, 13 aa, Homo Sapien
DEIDAPNASLDPK

SEQ ID NO: 3783 - protein, 10 aa, Homo Sapien
DGEEIVPSPK

SEQ ID NO: 3784 - protein, 13 aa, Homo Sapien
DGGSPITNYIVEK

SEQ ID NO: 3785 - protein, 8 aa, Homo Sapien
DHMTVSWK

SEQ ID NO: 3786 - protein, 9 aa, Homo Sapien
DLVIPPAFK

SEQ ID NO: 3787 - protein, 13 aa, Homo Sapien
DNGSPILGYWLEK

SEQ ID NO: 3788 - protein, 11 aa, Homo Sapien
DPIYPPDPPIK

SEQ ID NO: 3789 - protein, 16 aa, Homo Sapien
DSGDYTITAENSSGSK

SEQ ID NO: 3790 - protein, 17 aa, Homo Sapien
DSSGALIVQEPPSFVTK

SEQ ID NO: 3791 - protein, 25 aa, Homo Sapien
DSVHLTWEPPDDDGGSPLTGYVVEK

SEQ ID NO: 3792 - protein, 17 aa, Homo Sapien
DSVNLTWTEPASDGGSK

SEQ ID NO: 3793 - protein, 17 aa, Homo Sapien
DSVSITWEPPLLDGGSK

SEQ ID NO: 3794 - protein, 17 aa, Homo Sapien
DSVTLSWEPPLIDGGAK

SEQ ID NO: 3795 - protein, 10 aa, Homo Sapien
DTGEYTLELK

SEQ ID NO: 3796 - protein, 10 aa, Homo Sapien
DTGQYVLTLK

SEQ ID NO: 3797 - protein, 11 aa, Homo Sapien
DTTVSSDSVAK

SEQ ID NO: 3798 - protein, 9 aa, Homo Sapien
DVNVIEGTK

SEQ ID NO: 3799 - protein, 9 aa, Homo Sapien
EAEGVYEAK

SEQ ID NO: 3800 - protein, 9 aa, Homo Sapien
EAFSSVIIK

SEQ ID NO: 3801 - protein, 8 aa, Homo Sapien
EIIADGLK

SEQ ID NO: 3802 - protein, 9 aa, Homo Sapien
ELAESVIAK

SEQ ID NO: 3803 - protein, 9 aa, Homo Sapien
ELLLPVLIK

SEQ ID NO: 3804 - protein, 14 aa, Homo Sapien
ELPLIFITPLSDVK

SEQ ID NO: 3805 - protein, 11 aa, Homo Sapien
EPEPLEVLPGK

SEQ ID NO: 3806 - protein, 15 aa, Homo Sapien
EPGPPGTPFVTSISK

SEQ ID NO: 3807 - protein, 16 aa, Homo Sapien
EPPVFSSFPPIVETLK

SEQ ID NO: 3808 - protein, 7 aa, Homo Sapien
EVQVIEK

SEQ ID NO: 3809 - protein, 7 aa, Homo Sapien
EVQVLEK

SEQ ID NO: 3810 - protein, 15 aa, Homo Sapien
FEIELSEPDVHGQWK

SEQ ID NO: 3811 - protein, 15 aa, Homo Sapien
FETEISEDDIHANWK

SEQ ID NO: 3812 - protein, 11 aa, Homo Sapien
FGISEPLTSPK

SEQ ID NO: 3813 - protein, 15 aa, Homo Sapien
FNTEITAENLTINLK

SEQ ID NO: 3814 - protein, 8 aa, Homo Sapien
FTNITGEK

SEQ ID NO: 3815 - protein, 11 aa, Homo Sapien
FVMTIENPAGK

SEQ ID NO: 3816 - protein, 12 aa, Homo Sapien
GDWVTALASVTK

SEQ ID NO: 3817 - protein, 10 aa, Homo Sapien
GEPVQSEPVK

SEQ ID NO: 3818 - protein, 9 aa, Homo Sapien
GGIQIMAGK

SEQ ID NO: 3819 - protein, 11 aa, Homo Sapien
GGTAAFQATLK

SEQ ID NO: 3820 - protein, 10 aa, Homo Sapien
GLLQAFELLK

SEQ ID NO: 3821 - protein, 10 aa, Homo Sapien
GPTELTESQK

SEQ ID NO: 3822 - protein, 12 aa, Homo Sapien
GSDFWVEAGHTK

SEQ ID NO: 3823 - protein, 11 aa, Homo Sapien
GSLPITVTWLK

SEQ ID NO: 3824 - protein, 25 aa, Homo Sapien
GSMLVSWTPPLDNGGSPITGYWLEK

SEQ ID NO: 3825 - protein, 11 aa, Homo Sapien
GSPVIQVTWFK

SEQ ID NO: 3826 - protein, 8 aa, Homo Sapien
GTDQVLVK

SEQ ID NO: 3827 - protein, 11 aa, Homo Sapien
GVPFPTLTWFK

SEQ ID NO: 3828 - protein, 8 aa, Homo Sapien
GVYTVEAK

SEQ ID NO: 3829 - protein, 10 aa, Homo Sapien
GWQTVDTTVK

SEQ ID NO: 3830 - protein, 11 aa, Homo Sapien
GWSIVASDVTK

SEQ ID NO: 3831 - protein, 12 aa, Homo Sapien
HDSVSLTWTDPK

SEQ ID NO: 3832 - protein, 13 aa, Homo Sapien
HDSVSLTWTDPKK

SEQ ID NO: 3833 - protein, 23 aa, Homo Sapien
HILVINDSQFDDEGVYTAEVEGK

SEQ ID NO: 3834 - protein, 24 aa, Homo Sapien
HILVINDSQFDDEGVYTAEVEGKK

SEQ ID NO: 3835 - protein, 8 aa, Homo Sapien
HLQDVTLK

SEQ ID NO: 3836 - protein, 11 aa, Homo Sapien
IADASPDEGWK

SEQ ID NO: 3837 - protein, 8 aa, Homo Sapien
IDHYIVQK

SEQ ID NO: 3838 - protein, 14 aa, Homo Sapien
IEALPSDISIDEGK

SEQ ID NO: 3839 - protein, 14 aa, Homo Sapien
IEIPDLELADDLKK

SEQ ID NO: 3840 - protein, 13 aa, Homo Sapien
IEPLEVALGHLAK

SEQ ID NO: 3841 - protein, 10 aa, Homo Sapien
IESYVIEMLK

SEQ ID NO: 3842 - protein, 8 aa, Homo Sapien
IGGSPEIK

SEQ ID NO: 3843 - protein, 12 aa, Homo Sapien
IGHNVHLELPYK

SEQ ID NO: 3844 - protein, 12 aa, Homo Sapien
IGYSDPSDVPDK

SEQ ID NO: 3845 - protein, 19 aa, Homo Sapien
IHAENLYGISDPLVSDSMK

SEQ ID NO: 3846 - protein, 8 aa, Homo Sapien
IIPPSFTK

SEQ ID NO: 3847 - protein, 11 aa, Homo Sapien
IIQYIVEMQAK

SEQ ID NO: 3848 - protein, 10 aa, Homo Sapien
ILGYIVEYQK

SEQ ID NO: 3849 - protein, 10 aa, Homo Sapien
ILMPEQITIK

SEQ ID NO: 3850 - protein, 8 aa, Homo Sapien
IMGYIIEK

SEQ ID NO: 3851 - protein, 13 aa, Homo Sapien
INGSEPLQVSWYK

SEQ ID NO: 3852 - protein, 15 aa, Homo Sapien
INVTDSLDLTTLSIK

SEQ ID NO: 3853 - protein, 20 aa, Homo Sapien
IPVVLPEDEGIYTAFASNIK

SEQ ID NO: 3854 - protein, 8 aa, Homo Sapien
ISGSPEIK

SEQ ID NO: 3855 - protein, 8 aa, Homo Sapien
ISNYIVEK

SEQ ID NO: 3856 - protein, 11 aa, Homo Sapien
ISVTDTVSILK

SEQ ID NO: 3857 - protein, 8 aa, Homo Sapien
ITGYIVEK

SEQ ID NO: 3858 - protein, 9 aa, Homo Sapien
ITGYIVEKK

SEQ ID NO: 3859 - protein, 11 aa, Homo Sapien
ITGYVVEMQTK

SEQ ID NO: 3860 - protein, 8 aa, Homo Sapien
ITHYIVEK

SEQ ID NO: 3861 - protein, 15 aa, Homo Sapien
ITIENTEHYTHLVMK

SEQ ID NO: 3862 - protein, 8 aa, Homo Sapien
ITIENVPK

SEQ ID NO: 3863 - protein, 8 aa, Homo Sapien
ITNYVIEK

SEQ ID NO: 3864 - protein, 12 aa, Homo Sapien
ITQFVVPDLQTK

SEQ ID NO: 3865 - protein, 20 aa, Homo Sapien
IYAMNSEGLGEPALVPGTPK

SEQ ID NO: 3866 - protein, 16 aa, Homo Sapien
LAWTVVASEVVTNSLK

SEQ ID NO: 3867 - protein, 15 aa, Homo Sapien
LDQTGGVDFQAANVK

SEQ ID NO: 3868 - protein, 12 aa, Homo Sapien
LEDAGEVQLTAK

SEQ ID NO: 3869 - protein, 8 aa, Homo Sapien
LELAAAPK

SEQ ID NO: 3870 - protein, 8 aa, Homo Sapien
LEVVDVTK

SEQ ID NO: 3871 - protein, 10 aa, Homo Sapien
LFVETLHITK

SEQ ID NO: 3872 - protein, 11 aa, Homo Sapien
LGSATASINVK

SEQ ID NO: 3873 - protein, 8 aa, Homo Sapien
LIPPSFTK

SEQ ID NO: 3874 - protein, 12 aa, Homo Sapien
LIVEGAVVEFVK

SEQ ID NO: 3875 - protein, 8 aa, Homo Sapien
LLAGLTVK

SEQ ID NO: 3876 - protein, 8 aa, Homo Sapien
LNDYSIEK

SEQ ID NO: 3877 - protein, 14 aa, Homo Sapien
LSETVEETEGNSFK

SEQ ID NO: 3878 - protein, 8 aa, Homo Sapien
LSGVLTVK

SEQ ID NO: 3879 - protein, 8 aa, Homo Sapien
LTGYIVEK

SEQ ID NO: 3880 - protein, 13 aa, Homo Sapien
LTVLEGDPYFTGK

SEQ ID NO: 3881 - protein, 15 aa, Homo Sapien
MAHEGALTGVTTDQK

SEQ ID NO: 3882 - protein, 10 aa, Homo Sapien
MEVTGLEEGK

SEQ ID NO: 3883 - protein, 8 aa, Homo Sapien
MSGYPLPK

SEQ ID NO: 3884 - protein, 13 aa, Homo Sapien
MTASEALQHPWLK

SEQ ID NO: 3885 - protein, 18 aa, Homo Sapien
MTFENNVASLYLSGIEVK

SEQ ID NO: 3886 - protein, 14 aa, Homo Sapien
MTLVENTATLTVLK

SEQ ID NO: 3887 - protein, 13 aa, Homo Sapien
NAAGSASSSTSLK

SEQ ID NO: 3888 - protein, 12 aa, Homo Sapien
NDHISAHLEVPK

SEQ ID NO: 3889 - protein, 10 aa, Homo Sapien
NDSELHESWK

SEQ ID NO: 3890 - protein, 10 aa, Homo Sapien
NEEAIFDSSK

SEQ ID NO: 3891 - protein, 10 aa, Homo Sapien
NGILWQTVSK

SEQ ID NO: 3892 - protein, 8 aa, Homo Sapien
NLAVTDIK

SEQ ID NO: 3893 - protein, 10 aa, Homo Sapien
NNVASLVINK

SEQ ID NO: 3894 - protein, 10 aa, Homo Sapien
NPFVLPGPPK

SEQ ID NO: 3895 - protein, 10 aa, Homo Sapien
NPFVVPDAPK

SEQ ID NO: 3896 - protein, 9 aa, Homo Sapien
NPVIAQDPK

SEQ ID NO: 3897 - protein, 9 aa, Homo Sapien
NSDIIVPHK

SEQ ID NO: 3898 - protein, 7 aa, Homo Sapien
NSILWTK

SEQ ID NO: 3899 - protein, 7 aa, Homo Sapien
NSILWVK

SEQ ID NO: 3900 - protein, 7 aa, Homo Sapien
NSLIWVK

SEQ ID NO: 3901 - protein, 7 aa, Homo Sapien
NSLLWVK

SEQ ID NO: 3902 - protein, 11 aa, Homo Sapien
NSVTLIWTEPK

SEQ ID NO: 3903 - protein, 8 aa, Homo Sapien
NSVTLQWK

SEQ ID NO: 3904 - protein, 8 aa, Homo Sapien
NTATVSWK

SEQ ID NO: 3905 - protein, 16 aa, Homo Sapien
NVHFGDAADYTFVAGK

SEQ ID NO: 3906 - protein, 11 aa, Homo Sapien
NVTGTTSETIK

SEQ ID NO: 3907 - protein, 16 aa, Homo Sapien
PASDGGSEILGYVLEK

SEQ ID NO: 3908 - protein, 17 aa, Homo Sapien
PAYDGGSPIIGYLVEVK

SEQ ID NO: 3909 - protein, 9 aa, Homo Sapien
PGPPVGPIK

SEQ ID NO: 3910 - protein, 12 aa, Homo Sapien
PIAILQGLSDQK

SEQ ID NO: 3911 - protein, 9 aa, Homo Sapien
PITNYILEK

SEQ ID NO: 3912 - protein, 17 aa, Homo Sapien
PLFDGGAPITGYTVEYK

SEQ ID NO: 3913 - protein, 12 aa, Homo Sapien
PVPAMTWFHGQK

SEQ ID NO: 3914 - protein, 9 aa, Homo Sapien
QDSGQYTFK

SEQ ID NO: 3915 - protein, 20 aa, Homo Sapien
QEASFSSFSSSSASSMTEMK

SEQ ID NO: 3916 - protein, 9 aa, Homo Sapien
QFVPMSDMK

SEQ ID NO: 3917 - protein, 15 aa, Homo Sapien
QLITFTQELQDVVAK

SEQ ID NO: 3918 - protein, 9 aa, Homo Sapien
QLSVPVIAK

SEQ ID NO: 3919 - protein, 12 aa, Homo Sapien
QNATVQGLIQGK

SEQ ID NO: 3920 - protein, 12 aa, Homo Sapien
QQAIPDSTVEFK

SEQ ID NO: 3921 - protein, 12 aa, Homo Sapien
QSHMLLIEDMTK

SEQ ID NO: 3922 - protein, 9 aa, Homo Sapien
SAAFEDEAK

SEQ ID NO: 3923 - protein, 11 aa, Homo Sapien
SDVPIQAPHFK

SEQ ID NO: 3924 - protein, 11 aa, Homo Sapien
SHQGVYSLLAK

SEQ ID NO: 3925 - protein, 9 aa, Homo Sapien
SLEVTNIAK

SEQ ID NO: 3926 - protein, 7 aa, Homo Sapien
SSILWSK

SEQ ID NO: 3927 - protein, 9 aa, Homo Sapien
SSITLGWSK

SEQ ID NO: 3928 - protein, 25 aa, Homo Sapien
SSYSESSAVVAEYPFSPPGPPGTPK

SEQ ID NO: 3929 - protein, 10 aa, Homo Sapien
STAELYLTTK

SEQ ID NO: 3930 - protein, 11 aa, Homo Sapien
STDFATSLSVK

SEQ ID NO: 3931 - protein, 13 aa, Homo Sapien
TANSIFLTWDPPK

SEQ ID NO: 3932 - protein, 10 aa, Homo Sapien
TASPHFTVSK

SEQ ID NO: 3933 - protein, 10 aa, Homo Sapien
TEAYAVSSFK

SEQ ID NO: 3934 - protein, 15 aa, Homo Sapien
TEEGYYEAITAVELK

SEQ ID NO: 3935 - protein, 19 aa, Homo Sapien
TEHGYEASIAGSAIATLQK

SEQ ID NO: 3936 - protein, 14 aa, Homo Sapien
TGGSPITGYHLEFK

SEQ ID NO: 3937 - protein, 9 aa, Homo Sapien
TIIHDTQFK

SEQ ID NO: 3938 - protein, 7 aa, Homo Sapien
TNIEVEK

SEQ ID NO: 3939 - protein, 20 aa, Homo Sapien
TPLNPPEPPSNPPEVLDVTK

SEQ ID NO: 3940 - protein, 16 aa, Homo Sapien
TSGMLTVLEEEAVFTK

SEQ ID NO: 3941 - protein, 17 aa, Homo Sapien
TSVSLAWSVPEDEGGSK

SEQ ID NO: 3942 - protein, 8 aa, Homo Sapien
TTATFIAK

SEQ ID NO: 3943 - protein, 14 aa, Homo Sapien
TTLEELLEEDGEEK

SEQ ID NO: 3944 - protein, 10 aa, Homo Sapien
TWSTVTPEVK

SEQ ID NO: 3945 - protein, 11 aa, Homo Sapien
TWSTVTPEVKK

SEQ ID NO: 3946 - protein, 8 aa, Homo Sapien
TWSVVSHK

SEQ ID NO: 3947 - protein, 11 aa, Homo Sapien
TYALNAAGVSK

SEQ ID NO: 3948 - protein, 14 aa, Homo Sapien
TYFTNNVATLVFNK

SEQ ID NO: 3949 - protein, 11 aa, Homo Sapien
TYIPVMSGENK

SEQ ID NO: 3950 - protein, 13 aa, Homo Sapien
VAGSQPITVAWYK

SEQ ID NO: 3951 - protein, 13 aa, Homo Sapien
VAGTPELSVEWYK

SEQ ID NO: 3952 - protein, 9 aa, Homo Sapien
VDSGNYILK

SEQ ID NO: 3953 - protein, 10 aa, Homo Sapien
VGGDPIPNVK

SEQ ID NO: 3954 - protein, 10 aa, Homo Sapien
VGVGPTIETK

SEQ ID NO: 3955 - protein, 7 aa, Homo Sapien
VHIVIDK

SEQ ID NO: 3956 - protein, 9 aa, Homo Sapien
VIAENMAGK

SEQ ID NO: 3957 - protein, 20 aa, Homo Sapien
VLAENEYGIGLPAETAESVK

SEQ ID NO: 3958 - protein, 14 aa, Homo Sapien
VLDTPGPPQNLAVK

SEQ ID NO: 3959 - protein, 14 aa, Homo Sapien
VLDTPGPPVNVTVK

SEQ ID NO: 3960 - protein, 12 aa, Homo Sapien
VLDTPSPPVNLK

SEQ ID NO: 3961 - protein, 11 aa, Homo Sapien
VLEADPYFTVK

SEQ ID NO: 3962 - protein, 13 aa, Homo Sapien
VLPTIDLSTMPQK

SEQ ID NO: 3963 - protein, 19 aa, Homo Sapien
VMDFVTDLEFTVPDLVQGK

SEQ ID NO: 3964 - protein, 15 aa, Homo Sapien
VNAESTENNSLLTIK

SEQ ID NO: 3965 - protein, 15 aa, Homo Sapien
VPDAPDQPIVTEVTK

SEQ ID NO: 3966 - protein, 15 aa, Homo Sapien
VPGPPGTPQVTAVTK

SEQ ID NO: 3967 - protein, 20 aa, Homo Sapien
VSAENAAGLSEPSPPSAYQK

SEQ ID NO: 3968 - protein, 20 aa, Homo Sapien
VSAENAAGVGEPSPATVYYK

SEQ ID NO: 3969 - protein, 11 aa, Homo Sapien
VSAENQFGISK

SEQ ID NO: 3970 - protein, 11 aa, Homo Sapien
VSAVNIVGQGK

SEQ ID NO: 3971 - protein, 13 aa, Homo Sapien
VSGSLPISAQWFK

SEQ ID NO: 3972 - protein, 10 aa, Homo Sapien
VSVPDVTSVK

SEQ ID NO: 3973 - protein, 10 aa, Homo Sapien
VTGIPTPVVK

SEQ ID NO: 3974 - protein, 8 aa, Homo Sapien
VTGTPPIK

SEQ ID NO: 3975 - protein, 10 aa, Homo Sapien
VTGYLIEMQK

SEQ ID NO: 3976 - protein, 8 aa, Homo Sapien
VTGYPQPK

SEQ ID NO: 3977 - protein, 22 aa, Homo Sapien
VTVLDVPGPPGPVEISNVSAEK

SEQ ID NO: 3978 - protein, 17 aa, Homo Sapien
VVNDYGEDSSYAELFVK

SEQ ID NO: 3979 - protein, 11 aa, Homo Sapien
VYAENIAGIGK

SEQ ID NO: 3980 - protein, 11 aa, Homo Sapien
VYAENIVGVGK

SEQ ID NO: 3981 - protein, 17 aa, Homo Sapien
VYAENSAGLSSPSDPSK

SEQ ID NO: 3982 - protein, 11 aa, Homo Sapien
WEEPYHDGGSK

SEQ ID NO: 3983 - protein, 19 aa, Homo Sapien
WEPPLDDGGSEIINYTLEK

SEQ ID NO: 3984 - protein, 9 aa, Homo Sapien
WLEVINITK

SEQ ID NO: 3985 - protein, 9 aa, Homo Sapien
WYHNDVELK

SEQ ID NO: 3986 - protein, 13 aa, Homo Sapien
WYHNGVELQESSK

SEQ ID NO: 3987 - protein, 14 aa, Homo Sapien
YDGGSSINNYIVEK

SEQ ID NO: 3988 - protein, 13 aa, Homo Sapien
YEITAANSSGTTK

SEQ ID NO: 3989 - protein, 12 aa, Homo Sapien
YFLTLENTAGVK

SEQ ID NO: 3990 - protein, 19 aa, Homo Sapien
YGQSFALESDPIVAQYPYK

SEQ ID NO: 3991 - protein, 15 aa, Homo Sapien
YGVGEPLESAPVLMK

SEQ ID NO: 3992 - protein, 13 aa, Homo Sapien
YGVSGSDQTLTIK

SEQ ID NO: 3993 - protein, 13 aa, Homo Sapien
YILTIENGVGEPK

SEQ ID NO: 3994 - protein, 12 aa, Homo Sapien
YILTVENSSGSK

SEQ ID NO: 3995 - protein, 12 aa, Homo Sapien
YNLTLENNSGSK

SEQ ID NO: 3996 - protein, 11 aa, Homo Sapien
YTIEAENQSGK

SEQ ID NO: 3997 - protein, 12 aa, Homo Sapien
YTIEAENQSGKK

SEQ ID NO: 3998 - protein, 12 aa, Homo Sapien
YTLTLENSSGTK

SEQ ID NO: 3999 - protein, 9 aa, Homo Sapien
YTVINLFGK

SEQ ID NO: 4000 - protein, 13 aa, Homo Sapien
YTVTDLQAGEEYK

SEQ ID NO: 4001 - protein, 7 aa, Homo Sapien
YYHTLIK

SEQ ID NO: 4002 - protein, 8 aa, Homo Sapien
YYHTLIKK

SEQ ID NO: 4003 - protein, 9 aa, Homo Sapien
VPVDEFDGK

SEQ ID NO: 4004 - protein, 24 aa, Homo Sapien
VVSLEAELQDISSQESKDEASLAK

SEQ ID NO: 4005 - protein, 10 aa, Homo Sapien
VLTQLITGPK

SEQ ID NO: 4006 - protein, 14 aa, Homo Sapien
LEGDSEFLQPLYAK

SEQ ID NO: 4007 - protein, 19 aa, Homo Sapien
GYKPPDEGPSEYQTIPLNK

SEQ ID NO: 4008 - protein, 19 aa, Homo Sapien
VNAQAAAYEYMAAYIENAK

SEQ ID NO: 4009 - protein, 12 aa, Homo Sapien
QSSFALLGDLTK

SEQ ID NO: 4010 - protein, 10 aa, Homo Sapien
EQIEWLIEHK

SEQ ID NO: 4011 - protein, 13 aa, Homo Sapien
QVLLYEPQVNSPK

SEQ ID NO: 4012 - protein, 10 aa, Homo Sapien
TLWSLVAFPK

SEQ ID NO: 4013 - protein, 15 aa, Homo Sapien
ISNAQLQTELVEILK

SEQ ID NO: 4014 - protein, 12 aa, Homo Sapien
VLSHQDDTALLK

SEQ ID NO: 4015 - protein, 10 aa, Homo Sapien
VSEDLNQAFK

SEQ ID NO: 4016 - protein, 10 aa, Homo Sapien
DKPTHEILQK

SEQ ID NO: 4017 - protein, 17 aa, Homo Sapien
STLLLYQSPTTGLFPTK

SEQ ID NO: 4018 - protein, 8 aa, Homo Sapien
YGAAFTQK

SEQ ID NO: 4019 - protein, 13 aa, Homo Sapien
YYYVPADFVEYEK

SEQ ID NO: 4020 - protein, 17 aa, Homo Sapien
FSSSIAPHITTFLVHGK

SEQ ID NO: 4021 - protein, 10 aa, Homo Sapien
LLADELISPK

SEQ ID NO: 4022 - protein, 9 aa, Homo Sapien
SGSVYEPLK

SEQ ID NO: 4023 - protein, 17 aa, Homo Sapien
YNNGSTELHSSSVGLAK

SEQ ID NO: 4024 - protein, 11 aa, Homo Sapien
VLDPEGKGTIK

SEQ ID NO: 4025 - protein, 22 aa, Homo Sapien
TVEGGSSSVFSMFDQTQIQEFK

SEQ ID NO: 4026 - protein, 15 aa, Homo Sapien
LKGADPEDVITGAFK

SEQ ID NO: 4027 - protein, 20 aa, Homo Sapien
EASGPINFTVFLTMFGEKLK

SEQ ID NO: 4028 - protein, 13 aa, Homo Sapien
LNVKNEELDAMMK

SEQ ID NO: 4029 - protein, 24 aa, Homo Sapien
FSQEEIKNMWAAFPPDVGGNVDYK

SEQ ID NO: 4030 - protein, 8 aa, Homo Sapien
KVLDPEGK

SEQ ID NO: 4031 - protein, 18 aa, Homo Sapien
EASGPINFTVFLTMFGEK

SEQ ID NO: 4032 - protein, 13 aa, Homo Sapien
GADPEDVITGAFK

SEQ ID NO: 4033 - protein, 9 aa, Homo Sapien
NEELDAMMK

SEQ ID NO: 4034 - protein, 17 aa, Homo Sapien
NMWAAFPPDVGGNVDYK

SEQ ID NO: 4035 - protein, 10 aa, Homo Sapien
PEDVITGAFK

SEQ ID NO: 4036 - protein, 16 aa, Homo Sapien
SGPINFTVFLTMFGEK

SEQ ID NO: 4037 - protein, 9 aa, Homo Sapien
INQLYEQAK

SEQ ID NO: 4038 - protein, 21 aa, Homo Sapien
LLQAQLQAQKEELQSLMHQPK

SEQ ID NO: 4039 - protein, 10 aa, Homo Sapien
EQEPELSFLK

SEQ ID NO: 4040 - protein, 24 aa, Homo Sapien
EQLQAPVPPDSVPSLQNMGLLLDK

SEQ ID NO: 4041 - protein, 10 aa, Homo Sapien
LLQAQLQAQK

SEQ ID NO: 4042 - protein, 23 aa, Homo Sapien
NELHNLLDKPQLQGIPVLVLGNK

SEQ ID NO: 4043 - protein, 9 aa, Homo Sapien
TQQYYNVLK

SEQ ID NO: 4044 - protein, 25 aa, Homo Sapien
NPTLFIFAENDVVIPLKDVSLLTQK

SEQ ID NO: 4045 - protein, 17 aa, Homo Sapien
NPTLFIFAENDVVIPLK

SEQ ID NO: 4046 - protein, 8 aa, Homo Sapien
NLIEWLNK

SEQ ID NO: 4047 - protein, 8 aa, Homo Sapien
LELSVLYK

SEQ ID NO: 4048 - protein, 12 aa, Homo Sapien
EYAEDDNIYQQK

SEQ ID NO: 4049 - protein, 20 aa, Homo Sapien
ILAQITGTEHLKESEADNTK

SEQ ID NO: 4050 - protein, 14 aa, Homo Sapien
ASAAPKPEPVPVQK

SEQ ID NO: 4051 - protein, 15 aa, Homo Sapien
EVVKPVPITSPAVSK

SEQ ID NO: 4052 - protein, 24 aa, Homo Sapien
IGDVVLSIDGINAQGMTHLEAQNK

SEQ ID NO: 4053 - protein, 12 aa, Homo Sapien
ILAQITGTEHLK

SEQ ID NO: 4054 - protein, 15 aa, Homo Sapien
YTEFYHVPTHSDASK

SEQ ID NO: 4055 - protein, 16 aa, Homo Sapien
YTEFYHVPTHSDASKK

SEQ ID NO: 4056 - protein, 17 aa, Homo Sapien
LQGGKDFNMPLTISSLK

SEQ ID NO: 4057 - protein, 12 aa, Homo Sapien
DFNMPLTISSLK

SEQ ID NO: 4058 - protein, 20 aa, Homo Sapien
ILNNSGLPITSAIDLEDAAK

SEQ ID NO: 4059 - protein, 14 aa, Homo Sapien
LEGTNVQEAQKILN

SEQ ID NO: 4060 - protein, 13 aa, Homo Sapien
AVAIDLPGLGHSK

SEQ ID NO: 4061 - protein, 15 aa, Homo Sapien
QTEQADLINELYQGK

SEQ ID NO: 4062 - protein, 11 aa, Homo Sapien
NDEELNKLLGK

SEQ ID NO: 4063 - protein, 19 aa, Homo Sapien
VTIAQGGVLPNIQAVLLPK

SEQ ID NO: 4064 - protein, 21 aa, Homo Sapien
GNILIPGINEAVAAVTEEEHK

SEQ ID NO: 4065 - protein, 17 aa, Homo Sapien
EGGSIPVTLTFQEATGK

SEQ ID NO: 4066 - protein, 14 aa, Homo Sapien
ALEKDDLDFPPGEK

SEQ ID NO: 4067 - protein, 16 aa, Homo Sapien
DQIVVQKGDEAGGYVK

SEQ ID NO: 4068 - protein, 8 aa, Homo Sapien
EPSSPLPK

SEQ ID NO: 4069 - protein, 16 aa, Homo Sapien
ADLTGISPSPNLYLSK

SEQ ID NO: 4070 - protein, 12 aa, Homo Sapien
LSMFVLLPSHSK

SEQ ID NO: 4071 - protein, 17 aa, Homo Sapien
AKDAVSSGVASVVDVAK

SEQ ID NO: 4072 - protein, 15 aa, Homo Sapien
DAVSSGVASVVDVAK

SEQ ID NO: 4073 - protein, 15 aa, Homo Sapien
DAVSTGLTGAVNLAK

SEQ ID NO: 4074 - protein, 15 aa, Homo Sapien
DAVSTGLTGAVNVAK

SEQ ID NO: 4075 - protein, 15 aa, Homo Sapien
DAVTTGVTGAVNVAK

SEQ ID NO: 4076 - protein, 15 aa, Homo Sapien
DTMSTGLTGAANVAK

SEQ ID NO: 4077 - protein, 15 aa, Homo Sapien
DTVFSGVTGAMSMAK

SEQ ID NO: 4078 - protein, 15 aa, Homo Sapien
DTVTTGLVGAVNVAK

SEQ ID NO: 4079 - protein, 11 aa, Homo Sapien
EAIQGGLDTTK

SEQ ID NO: 4080 - protein, 18 aa, Homo Sapien
GAMQTGLNTTQNIATGTK

SEQ ID NO: 4081 - protein, 11 aa, Homo Sapien
GAVQGGLDTSK

SEQ ID NO: 4082 - protein, 11 aa, Homo Sapien
GAVQTGVDTAK

SEQ ID NO: 4083 - protein, 11 aa, Homo Sapien
GSIQTGVDTSK

SEQ ID NO: 4084 - protein, 11 aa, Homo Sapien
GTIQTGVDTSK

SEQ ID NO: 4085 - protein, 11 aa, Homo Sapien
GTIQTGVDTTK

SEQ ID NO: 4086 - protein, 11 aa, Homo Sapien
GTVQAGVDTTK

SEQ ID NO: 4087 - protein, 11 aa, Homo Sapien
GTVQTGMDTTK

SEQ ID NO: 4088 - protein, 11 aa, Homo Sapien
GTVQTGVDASK

SEQ ID NO: 4089 - protein, 11 aa, Homo Sapien
GTVQTGVDTSK

SEQ ID NO: 4090 - protein, 11 aa, Homo Sapien
GTVQTGVDTTK

SEQ ID NO: 4091 - protein, 11 aa, Homo Sapien
GTVQTSVDTTK

SEQ ID NO: 4092 - protein, 15 aa, Homo Sapien
NTFGSGVTSAVNVAK

SEQ ID NO: 4093 - protein, 11 aa, Homo Sapien
GAVQGGLDTTK

SEQ ID NO: 4094 - protein, 33 aa, Homo Sapien
TVGTPIASVPGSTNTGTVPGSEKDSDSMETEEK

SEQ ID NO: 4095 - protein, 10 aa, Homo Sapien
NNNTDLMILK

SEQ ID NO: 4096 - protein, 12 aa, Homo Sapien
EALQLMATYLPK

SEQ ID NO: 4097 - protein, 19 aa, Homo Sapien
NAQAIEDMVGYAQETQHEK

SEQ ID NO: 4098 - protein, 11 aa, Homo Sapien
VSTAVLSITAK

SEQ ID NO: 4099 - protein, 26 aa, Homo Sapien
GPGTSFEFALAIVEALNGKEVAAQVK

SEQ ID NO: 4100 - protein, 19 aa, Homo Sapien
GPGTSFEFALAIVEALNGK

SEQ ID NO: 4101 - protein, 9 aa, Homo Sapien
VTVAGLAGK

SEQ ID NO: 4102 - protein, 11 aa, Homo Sapien
EVSDSLLTSSK

SEQ ID NO: 4103 - protein, 16 aa, Homo Sapien
LPILNQPSTQIVANAK

SEQ ID NO: 4104 - protein, 16 aa, Homo Sapien
TITSVAMTSALPIIQK

SEQ ID NO: 4105 - protein, 22 aa, Homo Sapien
VVNLPLVSSTYDLMSSAYLSTK

SEQ ID NO: 4106 - protein, 16 aa, Homo Sapien
TEPTAQQNLALQLAEK

SEQ ID NO: 4107 - protein, 9 aa, Homo Sapien
EYTAAVEAK

SEQ ID NO: 4108 - protein, 12 aa, Homo Sapien
IVQAEGEAEAAK

SEQ ID NO: 4109 - protein, 11 aa, Homo Sapien
VLPSIVNEVLK

SEQ ID NO: 4110 - protein, 23 aa, Homo Sapien
LVGQGASAVLLDLPNSGGEAQAK

SEQ ID NO: 4111 - protein, 25 aa, Homo Sapien
GVIINTASVAAFEGQVGQAAYSASK

SEQ ID NO: 4112 - protein, 12 aa, Homo Sapien
KYAALYQPLFDK

SEQ ID NO: 4113 - protein, 11 aa, Homo Sapien
AAATAEEPDPK

SEQ ID NO: 4114 - protein, 11 aa, Homo Sapien
YAALYQPLFDK

SEQ ID NO: 4115 - protein, 18 aa, Homo Sapien
NVDMLSELVQEYDEPILK

SEQ ID NO: 4116 - protein, 26 aa, Homo Sapien
LEAPDADELPKGEFDPGQDTYQHPPK

SEQ ID NO: 4117 - protein, 9 aa, Homo Sapien
DFTPGKPLK

SEQ ID NO: 4118 - protein, 17 aa, Homo Sapien
KQGLLPLTFADPADYNK

SEQ ID NO: 4119 - protein, 11 aa, Homo Sapien
EDIANLADEFK

SEQ ID NO: 4120 - protein, 14 aa, Homo Sapien
FNPETDYLTGTDGK

SEQ ID NO: 4121 - protein, 15 aa, Homo Sapien
FNPETDYLTGTDGKK

SEQ ID NO: 4122 - protein, 15 aa, Homo Sapien
GEFDPGQDTYQHPPK

SEQ ID NO: 4123 - protein, 21 aa, Homo Sapien
GHLDNISNNLLIGAINIENGK

SEQ ID NO: 4124 - protein, 11 aa, Homo Sapien
LEAPDADELPK

SEQ ID NO: 4125 - protein, 9 aa, Homo Sapien
LQLLEPFDK

SEQ ID NO: 4126 - protein, 12 aa, Homo Sapien
LTGSLSGWSSPK

SEQ ID NO: 4127 - protein, 27 aa, Homo Sapien
NDANPETHAFVTSPEIVTALAIAGTLK

SEQ ID NO: 4128 - protein, 16 aa, Homo Sapien
QGLLPLTFADPADYNK

SEQ ID NO: 4129 - protein, 22 aa, Homo Sapien
VAMQDATAQMAMLQFISSGLSK

SEQ ID NO: 4130 - protein, 19 aa, Homo Sapien
VAMSHFEPNEYIHYDLLEK

SEQ ID NO: 4131 - protein, 18 aa, Homo Sapien
AKDINQEVYNFLATAGAK

SEQ ID NO: 4132 - protein, 13 aa, Homo Sapien
IHPVDKLTIQGLK

SEQ ID NO: 4133 - protein, 13 aa, Homo Sapien
LQLLEPFDKWDGK

SEQ ID NO: 4134 - protein, 16 aa, Homo Sapien
DINQEVYNFLATAGAK

SEQ ID NO: 4135 - protein, 10 aa, Homo Sapien
DLEDLQILIK

SEQ ID NO: 4136 - protein, 8 aa, Homo Sapien
VAGILTVK

SEQ ID NO: 4137 - protein, 18 aa, Homo Sapien
TLMEEDPEKYEELLQLIK

SEQ ID NO: 4138 - protein, 9 aa, Homo Sapien
TATQLAVNK

SEQ ID NO: 4139 - protein, 12 aa, Homo Sapien
ATISNDGATILK

SEQ ID NO: 4140 - protein, 10 aa, Homo Sapien
QQLLIGAYAK

SEQ ID NO: 4141 - protein, 12 aa, Homo Sapien
TFSYAGFEMQPK

SEQ ID NO: 4142 - protein, 7 aa, Homo Sapien
FDLMYAK

SEQ ID NO: 4143 - protein, 11 aa, Homo Sapien
LDHKFDLMYAK

SEQ ID NO: 4144 - protein, 10 aa, Homo Sapien
DVNAAIATIK

SEQ ID NO: 4145 - protein, 16 aa, Homo Sapien
IHFPLATYAPVISAEK

SEQ ID NO: 4146 - protein, 8 aa, Homo Sapien
LSVDYGKK

SEQ ID NO: 4147 - protein, 12 aa, Homo Sapien
QIFHPEQLITGK

SEQ ID NO: 4148 - protein, 12 aa, Homo Sapien
QLFHPEQLITGK

SEQ ID NO: 4149 - protein, 20 aa, Homo Sapien
TIGGGDDSFNTFFSETGAGK

SEQ ID NO: 4150 - protein, 18 aa, Homo Sapien
VGINYQPPTVVPGGDLAK

SEQ ID NO: 4151 - protein, 15 aa, Homo Sapien
ELAPDFYQPGPEYQK

SEQ ID NO: 4152 - protein, 16 aa, Homo Sapien
DIQSSFHPEKPISPFK

SEQ ID NO: 4153 - protein, 16 aa, Homo Sapien
AQTLLIQVISGQQLPK

SEQ ID NO: 4154 - protein, 10 aa, Homo Sapien
EGSIVDPLVK

SEQ ID NO: 4155 - protein, 11 aa, Homo Sapien
ILVSLIEVAQK

SEQ ID NO: 4156 - protein, 14 aa, Homo Sapien
AIQLSGAEQLEALK

SEQ ID NO: 4157 - protein, 16 aa, Homo Sapien
GNQLQEFAAMLMPHQK

SEQ ID NO: 4158 - protein, 20 aa, Homo Sapien
LYNNITFEELGALLEIPAAK

SEQ ID NO: 4159 - protein, 13 aa, Homo Sapien
KLFGQESGPSAEK

SEQ ID NO: 4160 - protein, 13 aa, Homo Sapien
KNVTLNPDPSETK

SEQ ID NO: 4161 - protein, 10 aa, Homo Sapien
AFSVVLFNTK

SEQ ID NO: 4162 - protein, 12 aa, Homo Sapien
NVTLNPDPSETK

SEQ ID NO: 4163 - protein, 15 aa, Homo Sapien
KAGEGLDQVHNSAAK

SEQ ID NO: 4164 - protein, 9 aa, Homo Sapien
HLVGDSLIK

SEQ ID NO: 4165 - protein, 13 aa, Homo Sapien
EVNEVSQNFQTTK

SEQ ID NO: 4166 - protein, 12 aa, Homo Sapien
LLLLHGADMMTK

SEQ ID NO: 4167 - protein, 12 aa, Homo Sapien
GFKGELIHVFNK

SEQ ID NO: 4168 - protein, 12 aa, Homo Sapien
SHGLLVQQALPK

SEQ ID NO: 4169 - protein, 15 aa, Homo Sapien
VVSNFMDFDETGVLK

SEQ ID NO: 4170 - protein, 10 aa, Homo Sapien
YPYMVEWYTK

SEQ ID NO: 4171 - protein, 9 aa, Homo Sapien
GELIHVFNK

SEQ ID NO: 4172 - protein, 13 aa, Homo Sapien
MADGVANVEHILK

SEQ ID NO: 4173 - protein, 13 aa, Homo Sapien
LLLDGAPLIAIHK

SEQ ID NO: 4174 - protein, 21 aa, Homo Sapien
DGLALGPGPFVTALEYATDTK

SEQ ID NO: 4175 - protein, 12 aa, Homo Sapien
EGADEEEWVVAK

SEQ ID NO: 4176 - protein, 17 aa, Homo Sapien
VIDLPGGGAAFVMEHLK

SEQ ID NO: 4177 - protein, 12 aa, Homo Sapien
MQELLQTQDFSK

SEQ ID NO: 4178 - protein, 7 aa, Homo Sapien
KLNDLIK

SEQ ID NO: 4179 - protein, 7 aa, Homo Sapien
KLNDLLK

SEQ ID NO: 4180 - protein, 16 aa, Homo Sapien
ETGTEHSPGVQPADVK

SEQ ID NO: 4181 - protein, 9 aa, Homo Sapien
VLQTEQAVK

SEQ ID NO: 4182 - protein, 10 aa, Homo Sapien
VPSSTVEYLK

SEQ ID NO: 4183 - protein, 11 aa, Homo Sapien
VPSSTVEYLKK

SEQ ID NO: 4184 - protein, 12 aa, Homo Sapien
FTVIYNEQMASK

SEQ ID NO: 4185 - protein, 15 aa, Homo Sapien
TIASLLTAAPNPHSK

SEQ ID NO: 4186 - protein, 16 aa, Homo Sapien
TIEDLDENQLKDEFFK

SEQ ID NO: 4187 - protein, 18 aa, Homo Sapien
IHEAIIQSPPIDYFDVFK

SEQ ID NO: 4188 - protein, 14 aa, Homo Sapien
DSSGPANSTADLLK

SEQ ID NO: 4189 - protein, 17 aa, Homo Sapien
LLDDAMAADKSDEWFAK

SEQ ID NO: 4190 - protein, 13 aa, Homo Sapien
ILTPLVSLDTPGK

SEQ ID NO: 4191 - protein, 13 aa, Homo Sapien
QGTIFLAGPPLVK

SEQ ID NO: 4192 - protein, 20 aa, Homo Sapien
LPDSALAGLAYSNLVYDWVK

SEQ ID NO: 4193 - protein, 8 aa, Homo Sapien
YSLADLLK

SEQ ID NO: 4194 - protein, 18 aa, Homo Sapien
SVADEQVTAIVNKPLMSK

SEQ ID NO: 4195 - protein, 15 aa, Homo Sapien
ELSPDFYQPGPDYVK

SEQ ID NO: 4196 - protein, 15 aa, Homo Sapien
IIQTPGLWESENQNK

SEQ ID NO: 4197 - protein, 20 aa, Homo Sapien
FLPTVGGQLGTAGQGFSYSK

SEQ ID NO: 4198 - protein, 23 aa, Homo Sapien
GGAAGTAGVGETGSGDQAGGEGK

SEQ ID NO: 4199 - protein, 19 aa, Homo Sapien
LIMELTGGGQESSGLNLGK

SEQ ID NO: 4200 - protein, 20 aa, Homo Sapien
LIMELTGGGQESSGLNLGKK

SEQ ID NO: 4201 - protein, 11 aa, Homo Sapien
PLSGTPAPNKK

SEQ ID NO: 4202 - protein, 9 aa, Homo Sapien
AMGVDPQQK

SEQ ID NO: 4203 - protein, 9 aa, Homo Sapien
ESSGLNLGK

SEQ ID NO: 4204 - protein, 20 aa, Homo Sapien
FIYENHPDVFSDSSMDHFQK

SEQ ID NO: 4205 - protein, 10 aa, Homo Sapien
PLSGTPAPNK

SEQ ID NO: 4206 - protein, 10 aa, Homo Sapien
TAMPYGGYEK

SEQ ID NO: 4207 - protein, 15 aa, Homo Sapien
EVHGNDVDGMDLGKK

SEQ ID NO: 4208 - protein, 23 aa, Homo Sapien
YYQSPWEQAISNDPELLEALYPK

SEQ ID NO: 4209 - protein, 10 aa, Homo Sapien
VATPFGGFEK

SEQ ID NO: 4210 - protein, 14 aa, Homo Sapien
HQAQIDHYLGLANK

SEQ ID NO: 4211 - protein, 31 aa, Homo Sapien
AAQAGVAVGDWVLSIDGENAGSLTHIEAQNK

SEQ ID NO: 4212 - protein, 21 aa, Homo Sapien
ILAHLTGTEFMQDPDEEHLKK

SEQ ID NO: 4213 - protein, 22 aa, Homo Sapien
KIHVYGYSMAYGPAQHAISTEK

SEQ ID NO: 4214 - protein, 18 aa, Homo Sapien
WAEYHADIYDKVSGDMQK

SEQ ID NO: 4215 - protein, 15 aa, Homo Sapien
AKYPDYEVTWANDGY

SEQ ID NO: 4216 - protein, 21 aa, Homo Sapien
IHVYGYSMAYGPAQHAISTEK

SEQ ID NO: 4217 - protein, 11 aa, Homo Sapien
WAEYHADIYDK

SEQ ID NO: 4218 - protein, 9 aa, Homo Sapien
TTLLPGLLK

SEQ ID NO: 4219 - protein, 12 aa, Homo Sapien
TYTIANQFPLNK

SEQ ID NO: 4220 - protein, 17 aa, Homo Sapien
TKDEYLINSQTTEHIVK

SEQ ID NO: 4221 - protein, 14 aa, Homo Sapien
ASPLLPANHVTMAK

SEQ ID NO: 4222 - protein, 12 aa, Homo Sapien
AVLEEGTDVVIK

SEQ ID NO: 4223 - protein, 11 aa, Homo Sapien
TGWISTSSIWK

SEQ ID NO: 4224 - protein, 11 aa, Homo Sapien
IGIVGLPNVGK

SEQ ID NO: 4225 - protein, 13 aa, Homo Sapien
NYIVEDGDIIFFK

SEQ ID NO: 4226 - protein, 8 aa, Homo Sapien
FNTPQQPK

SEQ ID NO: 4227 - protein, 15 aa, Homo Sapien
IPAFLNVVDIAGLVK

SEQ ID NO: 4228 - protein, 11 aa, Homo Sapien
AWGAVVPLVGK

SEQ ID NO: 4229 - protein, 13 aa, Homo Sapien
GLLAGNVFDWGAK

SEQ ID NO: 4230 - protein, 17 aa, Homo Sapien
GSYSYTQVGSSGADVEK

SEQ ID NO: 4231 - protein, 11 aa, Homo Sapien
VAEELALEQAK

SEQ ID NO: 4232 - protein, 16 aa, Homo Sapien
GAPEPGTQDASIPVEK

SEQ ID NO: 4233 - protein, 11 aa, Homo Sapien
NLLEIHGSLFK

SEQ ID NO: 4234 - protein, 9 aa, Homo Sapien
GDYAPILQK

SEQ ID NO: 4235 - protein, 10 aa, Homo Sapien
LVASAEQLLK

SEQ ID NO: 4236 - protein, 14 aa, Homo Sapien
GLEGLQVAWLVVEK

SEQ ID NO: 4237 - protein, 18 aa, Homo Sapien
SEEMDMDHIMTWATDVAK

SEQ ID NO: 4238 - protein, 13 aa, Homo Sapien
IVHAFDMEDLGDK

SEQ ID NO: 4239 - protein, 15 aa, Homo Sapien
HNEETGDNVGPLIIK

SEQ ID NO: 4240 - protein, 12 aa, Homo Sapien
ESNTAGIDIFSK

SEQ ID NO: 4241 - protein, 17 aa, Homo Sapien
AEGSSTASSGSQLAEGK

SEQ ID NO: 4242 - protein, 14 aa, Homo Sapien
SQGGVQPIPSQGGK

SEQ ID NO: 4243 - protein, 14 aa, Homo Sapien
YDEIFYNLAPADGK

SEQ ID NO: 4244 - protein, 16 aa, Homo Sapien
SKYDEIFYNLAPADGK

SEQ ID NO: 4245 - protein, 12 aa, Homo Sapien
MQELLMAHDFTK

SEQ ID NO: 4246 - protein, 19 aa, Homo Sapien
YKPVPDEPPNPTNIEEILK

SEQ ID NO: 4247 - protein, 30 aa, Homo Sapien
MIMTNPIATGKDPTFDTITYEWAPPGVTQK

SEQ ID NO: 4248 - protein, 23 aa, Homo Sapien
SEALGVGEVALPGQGGLPKEEGK

SEQ ID NO: 4249 - protein, 19 aa, Homo Sapien
DPTFDTITYEWAPPGVTQK

SEQ ID NO: 4250 - protein, 11 aa, Homo Sapien
LGLQYMELIPK

SEQ ID NO: 4251 - protein, 19 aa, Homo Sapien
SEALGVGEVALPGQGGLPK

SEQ ID NO: 4252 - protein, 14 aa, Homo Sapien
HEQILVLDPPTDLK

SEQ ID NO: 4253 - protein, 11 aa, Homo Sapien
EAKPDELMDSK

SEQ ID NO: 4254 - protein, 9 aa, Homo Sapien
AVSSQMIGK

SEQ ID NO: 4255 - protein, 26 aa, Homo Sapien
LHGGTPANFLDVGGGATVHQVTEAFK

SEQ ID NO: 4256 - protein, 10 aa, Homo Sapien
SPDEAYAIAK

SEQ ID NO: 4257 - protein, 9 aa, Homo Sapien
LSEIVTLAK

SEQ ID NO: 4258 - protein, 11 aa, Homo Sapien
APMFIYKPQSK

SEQ ID NO: 4259 - protein, 27 aa, Homo Sapien
IPSAMDSNYQQSSAGQPINAKPSQTAN

SEQ ID NO: 4260 - protein, 29 aa, Homo Sapien
IPSAMDSNYQQSSAGQPINAKPSQTANAK

SEQ ID NO: 4261 - protein, 21 aa, Homo Sapien
IPSAMDSNYQQSSAGQPINAK

SEQ ID NO: 4262 - protein, 16 aa, Homo Sapien
LQPPGPETSSFSSQTK

SEQ ID NO: 4263 - protein, 27 aa, Homo Sapien
VTTTYNQSPASFLSSILPSQPDYNSSK

SEQ ID NO: 4264 - protein, 12 aa, Homo Sapien
GDVNDQDAIQEK

SEQ ID NO: 4265 - protein, 17 aa, Homo Sapien
GDVVNQDDLYQALASGK

SEQ ID NO: 4266 - protein, 24 aa, Homo Sapien
IAAAGLDVTSPEPLPTNHPLLTLK

SEQ ID NO: 4267 - protein, 10 aa, Homo Sapien
ILDAAGANLK

SEQ ID NO: 4268 - protein, 11 aa, Homo Sapien
ALPAQDPPMEK

SEQ ID NO: 4269 - protein, 14 aa, Homo Sapien
LAADGTVMNTFAHK

SEQ ID NO: 4270 - protein, 10 aa, Homo Sapien
LVDEEPQLTK

SEQ ID NO: 4271 - protein, 16 aa, Homo Sapien
EKEDPEPSTDGTYVWK

SEQ ID NO: 4272 - protein, 9 aa, Homo Sapien
IFSQETLTK

SEQ ID NO: 4273 - protein, 10 aa, Homo Sapien
LFLSYDYAVK

SEQ ID NO: 4274 - protein, 14 aa, Homo Sapien
SNLISGSVMYIEEK

SEQ ID NO: 4275 - protein, 16 aa, Homo Sapien
WNGHTDMIDQDGLYEK

SEQ ID NO: 4276 - protein, 10 aa, Homo Sapien
GHFNIQPNKK

SEQ ID NO: 4277 - protein, 9 aa, Homo Sapien
MSQYLDSLK

SEQ ID NO: 4278 - protein, 12 aa, Homo Sapien
IQEWIPPSTPYK

SEQ ID NO: 4279 - protein, 8 aa, Homo Sapien
KFIWTNHK

SEQ ID NO: 4280 - protein, 17 aa, Homo Sapien
LKAYEDQTKPVLEYYQK

SEQ ID NO: 4281 - protein, 14 aa, Homo Sapien
KGVLETFSGTETNK

SEQ ID NO: 4282 - protein, 15 aa, Homo Sapien
AYEDQTKPVLEYYQK

SEQ ID NO: 4283 - protein, 13 aa, Homo Sapien
GVLETFSGTETNK

SEQ ID NO: 4284 - protein, 13 aa, Homo Sapien
SGNIPAGTTVDTK

SEQ ID NO: 4285 - protein, 17 aa, Homo Sapien
MEIDDLASNVETVSKAK

SEQ ID NO: 4286 - protein, 21 aa, Homo Sapien
TEGGATLTVKDDQVFPMNPPK

SEQ ID NO: 4287 - protein, 11 aa, Homo Sapien
KEFEISNLQSK

SEQ ID NO: 4288 - protein, 24 aa, Homo Sapien
VGNEYVTKGQTVEQVSNAVGALAK

SEQ ID NO: 4289 - protein, 8 aa, Homo Sapien
GTELFKIK

SEQ ID NO: 4290 - protein, 10 aa, Homo Sapien
SLGTELFKIK

SEQ ID NO: 4291 - protein, 23 aa, Homo Sapien
EFEISNLQSKIEDEQALGIQLQK

SEQ ID NO: 4292 - protein, 30 aa, Homo Sapien
EEITSGKIQGTLEDQIISANPLLEAFGNAK

SEQ ID NO: 4293 - protein, 19 aa, Homo Sapien
SEMKMEIDDLASNVETVSK

SEQ ID NO: 4294 - protein, 19 aa, Homo Sapien
LAQESIMDIENEKQQLDEK

SEQ ID NO: 4295 - protein, 26 aa, Homo Sapien
SAMKTLAQLFSGAQTAEGEGAGGGAK

SEQ ID NO: 4296 - protein, 10 aa, Homo Sapien
EFEISNLQSK

SEQ ID NO: 4297 - protein, 10 aa, Homo Sapien
EQYEEEQESK

SEQ ID NO: 4298 - protein, 16 aa, Homo Sapien
GQTVEQVSNAVGALAK

SEQ ID NO: 4299 - protein, 23 aa, Homo Sapien
IQGTLEDQIISANPLLEAFGNAK

SEQ ID NO: 4300 - protein, 12 aa, Homo Sapien
LTGAVMHYGNLK

SEQ ID NO: 4301 - protein, 15 aa, Homo Sapien
MEIDDLASNVETVSK

SEQ ID NO: 4302 - protein, 15 aa, Homo Sapien
QAEEAEEQSNTNLAK

SEQ ID NO: 4303 - protein, 10 aa, Homo Sapien
TEGGATLTVK

SEQ ID NO: 4304 - protein, 22 aa, Homo Sapien
TLAQLFSGAQTAEGEGAGGGAK

SEQ ID NO: 4305 - protein, 23 aa, Homo Sapien
TLAQLFSGAQTAEGEGAGGGAKK

SEQ ID NO: 4306 - protein, 14 aa, Homo Sapien
TSVFVAEPKESFVK

SEQ ID NO: 4307 - protein, 12 aa, Homo Sapien
SFMNVKHWPWMK

SEQ ID NO: 4308 - protein, 13 aa, Homo Sapien
IEDEQALGIQLQK

SEQ ID NO: 4309 - protein, 13 aa, Homo Sapien
LAQESIMDIENEK

SEQ ID NO: 4310 - protein, 14 aa, Homo Sapien
LQAAEEHVEAVNAK

SEQ ID NO: 4311 - protein, 10 aa, Homo Sapien
FATIAVTGDK

SEQ ID NO: 4312 - protein, 14 aa, Homo Sapien
VIQYFATIAVTGDK

SEQ ID NO: 4313 - protein, 15 aa, Homo Sapien
VIQYFATIAVTGDKK

SEQ ID NO: 4314 - protein, 17 aa, Homo Sapien
LYPAAVDTIVAIMAEGK

SEQ ID NO: 4315 - protein, 27 aa, Homo Sapien
IQENALPLMLAEPPQNLIAQSQSGTGK

SEQ ID NO: 4316 - protein, 11 aa, Homo Sapien
TASWLAAELSK

SEQ ID NO: 4317 - protein, 12 aa, Homo Sapien
MDQITAQKEEDK

SEQ ID NO: 4318 - protein, 10 aa, Homo Sapien
KPLNALDVMK

SEQ ID NO: 4319 - protein, 19 aa, Homo Sapien
HQPYQLNASLFTFQPPDAK

SEQ ID NO: 4320 - protein, 8 aa, Homo Sapien
VNSALAMK

SEQ ID NO: 4321 - protein, 12 aa, Homo Sapien
TPPPVAPKPAVK

SEQ ID NO: 4322 - protein, 8 aa, Homo Sapien
TGILQEAK

SEQ ID NO: 4323 - protein, 10 aa, Homo Sapien
LDPTQTSFLK

SEQ ID NO: 4324 - protein, 29 aa, Homo Sapien
ILLDQGQTHSVETPYGSVTFTVYGTPKPK

SEQ ID NO: 4325 - protein, 9 aa, Homo Sapien
GWMDWAAHK

SEQ ID NO: 4326 - protein, 15 aa, Homo Sapien
MADSGGQPQLTQPGK

SEQ ID NO: 4327 - protein, 22 aa, Homo Sapien
YALNHPDTVEGLVLINIDPNAK

SEQ ID NO: 4328 - protein, 16 aa, Homo Sapien
LGAAPEEESAYVAGEK

SEQ ID NO: 4329 - protein, 11 aa, Homo Sapien
TIIQNPTDQQK

SEQ ID NO: 4330 - protein, 23 aa, Homo Sapien
IMKPQDFEYVWQNFVEQEEGESK

SEQ ID NO: 4331 - protein, 18 aa, Homo Sapien
AFQPWEDIQENFLYYEEK

SEQ ID NO: 4332 - protein, 15 aa, Homo Sapien
LFMWEEPEIQAALKK

SEQ ID NO: 4333 - protein, 7 aa, Homo Sapien
LPANFFK

SEQ ID NO: 4334 - protein, 12 aa, Homo Sapien
AVLLAGPPGTGK

SEQ ID NO: 4335 - protein, 14 aa, Homo Sapien
TALALAIAQELGSK

SEQ ID NO: 4336 - protein, 14 aa, Homo Sapien
LTLDTIFVPNTGKK

SEQ ID NO: 4337 - protein, 23 aa, Homo Sapien
AADFQLHTHVNDGTEFGGSIYQK

SEQ ID NO: 4338 - protein, 11 aa, Homo Sapien
LSQNNFALGYK

SEQ ID NO: 4339 - protein, 13 aa, Homo Sapien
LTLDTIFVPNTGK

SEQ ID NO: 4340 - protein, 16 aa, Homo Sapien
WNTDNTLGTEISWENK

SEQ ID NO: 4341 - protein, 14 aa, Homo Sapien
LGGNVVVSLEGKPL

SEQ ID NO: 4342 - protein, 8 aa, Homo Sapien
QIIVEEAK

SEQ ID NO: 4343 - protein, 20 aa, Homo Sapien
QILVGDIGDTVEDPYTSFVK

SEQ ID NO: 4344 - protein, 10 aa, Homo Sapien
DGNLKDFPVK

SEQ ID NO: 4345 - protein, 10 aa, Homo Sapien
DGHGEAIMFK

SEQ ID NO: 4346 - protein, 14 aa, Homo Sapien
VTMSQASTEASSDK

SEQ ID NO: 4347 - protein, 14 aa, Homo Sapien
AGMSAEQAQGLLEK

SEQ ID NO: 4348 - protein, 11 aa, Homo Sapien
MELLAHLLGEK

SEQ ID NO: 4349 - protein, 16 aa, Homo Sapien
NEDITEPQSILAAAEK

SEQ ID NO: 4350 - protein, 9 aa, Homo Sapien
ILLLEAGPK

SEQ ID NO: 4351 - protein, 13 aa, Homo Sapien
HNTALLAATDLLK

SEQ ID NO: 4352 - protein, 11 aa, Homo Sapien
GIVLLEELLPK

SEQ ID NO: 4353 - protein, 30 aa, Homo Sapien
TNLDESDVQPVKEQLAQAMFDHIPVGVGSK

SEQ ID NO: 4354 - protein, 11 aa, Homo Sapien
IASPEGQDYLK

SEQ ID NO: 4355 - protein, 11 aa, Homo Sapien
LVMEEAPESYK

SEQ ID NO: 4356 - protein, 23 aa, Homo Sapien
VFNTTPDDLDLHVIYDVSHNIAK

SEQ ID NO: 4357 - protein, 26 aa, Homo Sapien
LGAASLGAEDPETQVVLINAVKDVAK

SEQ ID NO: 4358 - protein, 10 aa, Homo Sapien
ALGDLISATK

SEQ ID NO: 4359 - protein, 17 aa, Homo Sapien
EADESLNFEEQILEAAK

SEQ ID NO: 4360 - protein, 28 aa, Homo Sapien
GSQAQPDSPSAQLALIAASQSFLQPGGK

SEQ ID NO: 4361 - protein, 8 aa, Homo Sapien
ILADATAK

SEQ ID NO: 4362 - protein, 21 aa, Homo Sapien
QAAASATQTIAAAQHAASTPK

SEQ ID NO: 4363 - protein, 14 aa, Homo Sapien
TLAESALQLLYTAK

SEQ ID NO: 4364 - protein, 9 aa, Homo Sapien
ADTIDTIEK

SEQ ID NO: 4365 - protein, 9 aa, Homo Sapien
VEVYLTELK

SEQ ID NO: 4366 - protein, 12 aa, Homo Sapien
SLSVDPGAPNAK

SEQ ID NO: 4367 - protein, 12 aa, Homo Sapien
VATNAAAQNAIK

SEQ ID NO: 4368 - protein, 12 aa, Homo Sapien
LPATEKPVLLSK

SEQ ID NO: 4369 - protein, 8 aa, Homo Sapien
TVALLTEK

SEQ ID NO: 4370 - protein, 8 aa, Homo Sapien
VALLLLEK

SEQ ID NO: 4371 - protein, 21 aa, Homo Sapien
LTGSYNTMVGNNEGSMVLGLK

SEQ ID NO: 4372 - protein, 10 aa, Homo Sapien
VTFQFSYGTK

SEQ ID NO: 4373 - protein, 8 aa, Homo Sapien
LNSYIQGK

SEQ ID NO: 4374 - protein, 10 aa, Homo Sapien
SFDGFSSAQK

SEQ ID NO: 4375 - protein, 12 aa, Homo Sapien
VYYTAGYNSPVK

SEQ ID NO: 4376 - protein, 13 aa, Homo Sapien
AALLNFDEFAVSK

SEQ ID NO: 4377 - protein, 10 aa, Homo Sapien
EIAEPLFDLK

SEQ ID NO: 4378 - protein, 28 aa, Homo Sapien
GPFPPPPPLPLAAPLPHSVPDSSALPTK

SEQ ID NO: 4379 - protein, 15 aa, Homo Sapien
SGLGDDLVQALGLSK

SEQ ID NO: 4380 - protein, 18 aa, Homo Sapien
SNAINIGLTTLPPVHVIK

SEQ ID NO: 4381 - protein, 11 aa, Homo Sapien
TQLVLYENALK

SEQ ID NO: 4382 - protein, 28 aa, Homo Sapien
EEQAEPDGTEVADKAAYLTSLNSADLLK

SEQ ID NO: 4383 - protein, 18 aa, Homo Sapien
LLGSIEIDHTQYKFGHTK

SEQ ID NO: 4384 - protein, 15 aa, Homo Sapien
EQIAEGGKHIHELEK

SEQ ID NO: 4385 - protein, 17 aa, Homo Sapien
LTEQIAEGGKHIHELEK

SEQ ID NO: 4386 - protein, 25 aa, Homo Sapien
NLQQEISDLTEQIAEGGKHIHELEK

SEQ ID NO: 4387 - protein, 17 aa, Homo Sapien
ASEKLLGSIEIDHTQYK

SEQ ID NO: 4388 - protein, 11 aa, Homo Sapien
LQDLVDKLQTK

SEQ ID NO: 4389 - protein, 14 aa, Homo Sapien
AAYLTSLNSADLLK

SEQ ID NO: 4390 - protein, 13 aa, Homo Sapien
LLGSIEIDHTQYK

SEQ ID NO: 4391 - protein, 14 aa, Homo Sapien
LQDAEEHVEAVNSK

SEQ ID NO: 4392 - protein, 15 aa, Homo Sapien
QAEEAEEQSNVNLAK

SEQ ID NO: 4393 - protein, 13 aa, Homo Sapien
YEETQAELEASQK

SEQ ID NO: 4394 - protein, 28 aa, Homo Sapien
LLESKEELDSLMTDETIANVPILILGNK

SEQ ID NO: 4395 - protein, 23 aa, Homo Sapien
EELDSLMTDETIANVPILILGNK

SEQ ID NO: 4396 - protein, 11 aa, Homo Sapien
LVFLGLDNAGK

SEQ ID NO: 4397 - protein, 17 aa, Homo Sapien
SVSSNVASVSPIPAGSK

SEQ ID NO: 4398 - protein, 10 aa, Homo Sapien
HFEDTSYGYK

SEQ ID NO: 4399 - protein, 9 aa, Homo Sapien
LQNLGELNK

SEQ ID NO: 4400 - protein, 12 aa, Homo Sapien
LYPDVGQLIDEK

SEQ ID NO: 4401 - protein, 14 aa, Homo Sapien
AAAEVNQDYGLDPK

SEQ ID NO: 4402 - protein, 9 aa, Homo Sapien
AAAFEQLQK

SEQ ID NO: 4403 - protein, 12 aa, Homo Sapien
AAALEAMKDYTK

SEQ ID NO: 4404 - protein, 8 aa, Homo Sapien
AAALEQFK

SEQ ID NO: 4405 - protein, 19 aa, Homo Sapien
AAAQLLQSQAQQSGAQQTK

SEQ ID NO: 4406 - protein, 20 aa, Homo Sapien
AAAVGTANKSTVEGIQASVK

SEQ ID NO: 4407 - protein, 13 aa, Homo Sapien
AADFIEELSSLFK

SEQ ID NO: 4408 - protein, 9 aa, Homo Sapien
AADLVETMK

SEQ ID NO: 4409 - protein, 12 aa, Homo Sapien
AAEEHVEAVNAK

SEQ ID NO: 4410 - protein, 12 aa, Homo Sapien
AAELHLVHWNPK

SEQ ID NO: 4411 - protein, 19 aa, Homo Sapien
AAESLADPTEYENLFPGLK

SEQ ID NO: 4412 - protein, 14 aa, Homo Sapien
AAILPTSIFLTNKK

SEQ ID NO: 4413 - protein, 14 aa, Homo Sapien
AALSGANVLTLIEK

SEQ ID NO: 4414 - protein, 9 aa, Homo Sapien
AAQASDLEK

SEQ ID NO: 4415 - protein, 12 aa, Homo Sapien
AAQLATEIADIK

SEQ ID NO: 4416 - protein, 8 aa, Homo Sapien
AAQSLLNK

SEQ ID NO: 4417 - protein, 15 aa, Homo Sapien
AAQVTIQSSGTFSSK

SEQ ID NO: 4418 - protein, 10 aa, Homo Sapien
AATLAQELEK

SEQ ID NO: 4419 - protein, 15 aa, Homo Sapien
AAVVTSPPPTTAPHK

SEQ ID NO: 4420 - protein, 18 aa, Homo Sapien
ADGEYWLGLQNMHLLTLK

SEQ ID NO: 4421 - protein, 11 aa, Homo Sapien
ADGGTQVIDTK

SEQ ID NO: 4422 - protein, 16 aa, Homo Sapien
ADIFMFDEPSSYLDVK

SEQ ID NO: 4423 - protein, 12 aa, Homo Sapien
ADKDYSVTANSK

SEQ ID NO: 4424 - protein, 9 aa, Homo Sapien
ADLAAVEAK

SEQ ID NO: 4425 - protein, 19 aa, Homo Sapien
ADLEMQIESLTEELAYLKK

SEQ ID NO: 4426 - protein, 16 aa, Homo Sapien
ADLFYDVEALDLESPK

SEQ ID NO: 4427 - protein, 9 aa, Homo Sapien
ADLIAYLKK

SEQ ID NO: 4428 - protein, 15 aa, Homo Sapien
ADMVIEAVFEDLSLK

SEQ ID NO: 4429 - protein, 20 aa, Homo Sapien
ADNDAGNAAIDSLLNYETVK

SEQ ID NO: 4430 - protein, 9 aa, Homo Sapien
ADNVKDWSK

SEQ ID NO: 4431 - protein, 11 aa, Homo Sapien
ADSAILTDQTK

SEQ ID NO: 4432 - protein, 9 aa, Homo Sapien
ADVDISGPK

SEQ ID NO: 4433 - protein, 11 aa, Homo Sapien
ADVVESWIGEK

SEQ ID NO: 4434 - protein, 7 aa, Homo Sapien
AEAEWFK

SEQ ID NO: 4435 - protein, 14 aa, Homo Sapien
AEEEEEINAELTAK

SEQ ID NO: 4436 - protein, 7 aa, Homo Sapien
AEEILEK

SEQ ID NO: 4437 - protein, 12 aa, Homo Sapien
AEGPDVAVDLPK

SEQ ID NO: 4438 - protein, 25 aa, Homo Sapien
AEGSDVANAVLDGADCIMLSGETAK

SEQ ID NO: 4439 - protein, 15 aa, Homo Sapien
AELEALLSSKDDVGK

SEQ ID NO: 4440 - protein, 16 aa, Homo Sapien
AELGALPDDFIDSLEK

SEQ ID NO: 4441 - protein, 8 aa, Homo Sapien
AESFFQTK

SEQ ID NO: 4442 - protein, 12 aa, Homo Sapien
AESLQQEVEALK

SEQ ID NO: 4443 - protein, 10 aa, Homo Sapien
AEVAESQVNK

SEQ ID NO: 4444 - protein, 30 aa, Homo Sapien
AEVLIHNNADGTYHITYSPAFPGTYTITIK

SEQ ID NO: 4445 - protein, 14 aa, Homo Sapien
AFFPNMVNMIVLDK

SEQ ID NO: 4446 - protein, 11 aa, Homo Sapien
AFITNIPFDVK

SEQ ID NO: 4447 - protein, 31 aa, Homo Sapien
AFLADPSAFVAAAPVAAATTAAPAAAAAPAK

SEQ ID NO: 4448 - protein, 9 aa, Homo Sapien
AFTYINLDK

SEQ ID NO: 4449 - protein, 8 aa, Homo Sapien
AFVEAQNK

SEQ ID NO: 4450 - protein, 8 aa, Homo Sapien
AFVVSVGK

SEQ ID NO: 4451 - protein, 19 aa, Homo Sapien
AGAYDFPSPEWDTVTPEAK

SEQ ID NO: 4452 - protein, 10 aa, Homo Sapien
AGFAGDQIPK

SEQ ID NO: 4453 - protein, 13 aa, Homo Sapien
AGLLFIFNFHPSK

SEQ ID NO: 4454 - protein, 15 aa, Homo Sapien
AGQGNVGLALLWSEK

SEQ ID NO: 4455 - protein, 11 aa, Homo Sapien
AGTPSLVTYLK

SEQ ID NO: 4456 - protein, 9 aa, Homo Sapien
AGVAPLQVK

SEQ ID NO: 4457 - protein, 7 aa, Homo Sapien
AGWEEEK

SEQ ID NO: 4458 - protein, 9 aa, Homo Sapien
AHAFAVQQK

SEQ ID NO: 4459 - protein, 22 aa, Homo Sapien
AHGPGLEGGLVGKPAEFTIDTK

SEQ ID NO: 4460 - protein, 12 aa, Homo Sapien
AHQLWLSVEALK

SEQ ID NO: 4461 - protein, 11 aa, Homo Sapien
AHVDEFKSVSK

SEQ ID NO: 4462 - protein, 23 aa, Homo Sapien
AIAHYEQSADYYKGEESNSSANK

SEQ ID NO: 4463 - protein, 12 aa, Homo Sapien
AIAVTVQEMVTK

SEQ ID NO: 4464 - protein, 10 aa, Homo Sapien
AIDLFTDAIK

SEQ ID NO: 4465 - protein, 21 aa, Homo Sapien
AIEALKEFNEDGALAVLQQFK

SEQ ID NO: 4466 - protein, 11 aa, Homo Sapien
AIEAVAISPWK

SEQ ID NO: 4467 - protein, 13 aa, Homo Sapien
AIELFSVGQGPAK

SEQ ID NO: 4468 - protein, 18 aa, Homo Sapien
AIENIDTLTNLESLFLGK

SEQ ID NO: 4469 - protein, 19 aa, Homo Sapien
AIGSASEGAQSSLQEVYHK

SEQ ID NO: 4470 - protein, 12 aa, Homo Sapien
AINEAYKEDYHK

SEQ ID NO: 4471 - protein, 8 aa, Homo Sapien
AINVQEEK

SEQ ID NO: 4472 - protein, 16 aa, Homo Sapien
AIQGGTSHHLGQNFSK

SEQ ID NO: 4473 - protein, 15 aa, Homo Sapien
AIQLTYNPDESSKPN

SEQ ID NO: 4474 - protein, 14 aa, Homo Sapien
AITHLNNNFMFGQK

SEQ ID NO: 4475 - protein, 9 aa, Homo Sapien
AITTSLTTK

SEQ ID NO: 4476 - protein, 23 aa, Homo Sapien
AITVFSPDGHLFQVEYAQEAVKK

SEQ ID NO: 4477 - protein, 18 aa, Homo Sapien
AIVAGDQNVEYKGTVWHK

SEQ ID NO: 4478 - protein, 14 aa, Homo Sapien
AKEEQQDDTVYMGK

SEQ ID NO: 4479 - protein, 20 aa, Homo Sapien
AKEILQEEEDLAEIVQLVGK

SEQ ID NO: 4480 - protein, 12 aa, Homo Sapien
AKTNADTDGMVK

SEQ ID NO: 4481 - protein, 11 aa, Homo Sapien
ALAAGGYDVEK

SEQ ID NO: 4482 - protein, 20 aa, Homo Sapien
ALAPTWEQLALGLEHSETVK

SEQ ID NO: 4483 - protein, 8 aa, Homo Sapien
ALASIDSK

SEQ ID NO: 4484 - protein, 13 aa, Homo Sapien
ALASIDSKLNQAK

SEQ ID NO: 4485 - protein, 9 aa, Homo Sapien
ALASLMTYK

SEQ ID NO: 4486 - protein, 8 aa, Homo Sapien
ALDFIASK

SEQ ID NO: 4487 - protein, 9 aa, Homo Sapien
ALEEAMEQK

SEQ ID NO: 4488 - protein, 10 aa, Homo Sapien
ALEHFPMLQK

SEQ ID NO: 4489 - protein, 10 aa, Homo Sapien
ALELDSNNEK

SEQ ID NO: 4490 - protein, 8 aa, Homo Sapien
ALEQALEK

SEQ ID NO: 4491 - protein, 10 aa, Homo Sapien
ALEQQVEEMK

SEQ ID NO: 4492 - protein, 27 aa, Homo Sapien
ALEQQVEEMKTQLEELEDELQATEDAK

SEQ ID NO: 4493 - protein, 16 aa, Homo Sapien
ALIPLALEGTDVGKVK

SEQ ID NO: 4494 - protein, 15 aa, Homo Sapien
ALLAYAFALAGNQDK

SEQ ID NO: 4495 - protein, 11 aa, Homo Sapien
ALLEVVQSGGK

SEQ ID NO: 4496 - protein, 10 aa, Homo Sapien
ALLPILQWHK

SEQ ID NO: 4497 - protein, 21 aa, Homo Sapien
ALMLQGVDLLADAVAVTMGPK

SEQ ID NO: 4498 - protein, 10 aa, Homo Sapien
ALNSLTGEFK

SEQ ID NO: 4499 - protein, 11 aa, Homo Sapien
ALQATVGNSYK

SEQ ID NO: 4500 - protein, 9 aa, Homo Sapien
ALQEKVEIK

SEQ ID NO: 4501 - protein, 17 aa, Homo Sapien
ALQQYTLEPSEKPFDLK

SEQ ID NO: 4502 - protein, 14 aa, Homo Sapien
ALQSVGQIVGEVLK

SEQ ID NO: 4503 - protein, 15 aa, Homo Sapien
ALSDHHVYLEGTLLK

SEQ ID NO: 4504 - protein, 11 aa, Homo Sapien
ALSQLAEVEEK

SEQ ID NO: 4505 - protein, 12 aa, Homo Sapien
ALSSEGKPYVTK

SEQ ID NO: 4506 - protein, 16 aa, Homo Sapien
ALTDKVTDLLGGLFSK

SEQ ID NO: 4507 - protein, 11 aa, Homo Sapien
ALTLIAGSPLK

SEQ ID NO: 4508 - protein, 15 aa, Homo Sapien
ALTLPGSSENEYIMK

SEQ ID NO: 4509 - protein, 15 aa, Homo Sapien
ALTVPELTQQMFDSK

SEQ ID NO: 4510 - protein, 9 aa, Homo Sapien
ALVPGNIFK

SEQ ID NO: 4511 - protein, 18 aa, Homo Sapien
ALYLSDNDFEILPPDIGK

SEQ ID NO: 4512 - protein, 12 aa, Homo Sapien
AMLESIGVPLEK

SEQ ID NO: 4513 - protein, 9 aa, Homo Sapien
AMQDAEVSK

SEQ ID NO: 4514 - protein, 13 aa, Homo Sapien
AMQEQLENYDFTK

SEQ ID NO: 4515 - protein, 11 aa, Homo Sapien
AMVASGSELGK

SEQ ID NO: 4516 - protein, 15 aa, Homo Sapien
AMYLPDTLSPADQLK

SEQ ID NO: 4517 - protein, 10 aa, Homo Sapien
ANENASFLQK

SEQ ID NO: 4518 - protein, 13 aa, Homo Sapien
ANLPQSFQVDTSK

SEQ ID NO: 4519 - protein, 15 aa, Homo Sapien
ANTVQEATFQMELPK

SEQ ID NO: 4520 - protein, 17 aa, Homo Sapien
APEEHPTLLTEAPLNPK

SEQ ID NO: 4521 - protein, 9 aa, Homo Sapien
APFDLFENK

SEQ ID NO: 4522 - protein, 9 aa, Homo Sapien
APGFAQMLK

SEQ ID NO: 4523 - protein, 12 aa, Homo Sapien
APMFVMGVNHEK

SEQ ID NO: 4524 - protein, 21 aa, Homo Sapien
APPPVAYNPIHSPSYPLAALK

SEQ ID NO: 4525 - protein, 11 aa, Homo Sapien
APSDLYQIILK

SEQ ID NO: 4526 - protein, 12 aa, Homo Sapien
APSTWLTAYVVK

SEQ ID NO: 4527 - protein, 16 aa, Homo Sapien
AQDGSHPLSLQDLIEK

SEQ ID NO: 4528 - protein, 11 aa, Homo Sapien
AQHEDQVEQYK

SEQ ID NO: 4529 - protein, 17 aa, Homo Sapien
AQLGVQAFADALLIIPK

SEQ ID NO: 4530 - protein, 19 aa, Homo Sapien
AQTLPTSVVTITSESSPGK

SEQ ID NO: 4531 - protein, 9 aa, Homo Sapien
AQWEMPQVK

SEQ ID NO: 4532 - protein, 11 aa, Homo Sapien
ASAPESGLLSK

SEQ ID NO: 4533 - protein, 11 aa, Homo Sapien
ASELATLIQTK

SEQ ID NO: 4534 - protein, 16 aa, Homo Sapien
ASGNYATVISHNPETK

SEQ ID NO: 4535 - protein, 17 aa, Homo Sapien
ASGNYATVISHNPETKK

SEQ ID NO: 4536 - protein, 24 aa, Homo Sapien
ASGPGLNTTGVPASLPVEFTIDAK

SEQ ID NO: 4537 - protein, 16 aa, Homo Sapien
ASIHEAWTDGKEAMLK

SEQ ID NO: 4538 - protein, 11 aa, Homo Sapien
ASILNTWISLK

SEQ ID NO: 4539 - protein, 17 aa, Homo Sapien
ASIPFSVVGSNQLIEAK

SEQ ID NO: 4540 - protein, 11 aa, Homo Sapien
ASLENSLEETK

SEQ ID NO: 4541 - protein, 13 aa, Homo Sapien
ASNGDAWVEAHGK

SEQ ID NO: 4542 - protein, 16 aa, Homo Sapien
ASNLENSTYDLYTIPK

SEQ ID NO: 4543 - protein, 16 aa, Homo Sapien
ASTNAMLISAGLPPLK

SEQ ID NO: 4544 - protein, 10 aa, Homo Sapien
ATALAIMGDK

SEQ ID NO: 4545 - protein, 11 aa, Homo Sapien
ATDFVVPGPGK

SEQ ID NO: 4546 - protein, 9 aa, Homo Sapien
ATDVMIAGK

SEQ ID NO: 4547 - protein, 8 aa, Homo Sapien
ATFDAISK

SEQ ID NO: 4548 - protein, 11 aa, Homo Sapien
ATGVLYDYVNK

SEQ ID NO: 4549 - protein, 10 aa, Homo Sapien
ATIGADFLTK

SEQ ID NO: 4550 - protein, 10 aa, Homo Sapien
ATLTFSHLNK

SEQ ID NO: 4551 - protein, 15 aa, Homo Sapien
ATLYALSHAVNNYHK

SEQ ID NO: 4552 - protein, 25 aa, Homo Sapien
ATNVGDEGGFAPNILENNEALELLK

SEQ ID NO: 4553 - protein, 21 aa, Homo Sapien
AVANETGAFFFLINGPEIMSK

SEQ ID NO: 4554 - protein, 13 aa, Homo Sapien
AVANYDSVEEGEK

SEQ ID NO: 4555 - protein, 31 aa, Homo Sapien
AVAQDNTENPDLSIIWIDPDDFPLLVPYWEK

SEQ ID NO: 4556 - protein, 12 aa, Homo Sapien
AVASAAAALVLK

SEQ ID NO: 4557 - protein, 13 aa, Homo Sapien
AVAVVVDPIQSVK

SEQ ID NO: 4558 - protein, 12 aa, Homo Sapien
AVEDKNIGPLVK

SEQ ID NO: 4559 - protein, 14 aa, Homo Sapien
AVFQANQENLPILK

SEQ ID NO: 4560 - protein, 15 aa, Homo Sapien
AVGFSSGTENPHGVK

SEQ ID NO: 4561 - protein, 11 aa, Homo Sapien
AVLLGPPGAGK

SEQ ID NO: 4562 - protein, 30 aa, Homo Sapien
AVLTIDEKGTEAAGAMFLEAIPMSIPPEVK

SEQ ID NO: 4563 - protein, 7 aa, Homo Sapien
AVNYFSK

SEQ ID NO: 4564 - protein, 24 aa, Homo Sapien
AVPHPDSQPDTIDHDLLLLQLSEK

SEQ ID NO: 4565 - protein, 15 aa, Homo Sapien
AVVQVFEGTSGIDAK

SEQ ID NO: 4566 - protein, 8 aa, Homo Sapien
AYANVSSK

SEQ ID NO: 4567 - protein, 12 aa, Homo Sapien
AYFHLLNQIAPK

SEQ ID NO: 4568 - protein, 10 aa, Homo Sapien
AYFLDGSLLK

SEQ ID NO: 4569 - protein, 14 aa, Homo Sapien
AYGPGIEPTGNMVK

SEQ ID NO: 4570 - protein, 16 aa, Homo Sapien
AYLESEVAISEELVQK

SEQ ID NO: 4571 - protein, 10 aa, Homo Sapien
AYSEAHEISK

SEQ ID NO: 4572 - protein, 14 aa, Homo Sapien
AYSNIKDYIDEAEK

SEQ ID NO: 4573 - protein, 12 aa, Homo Sapien
AYYHLLEQVAPK

SEQ ID NO: 4574 - protein, 12 aa, Homo Sapien
DAALATALGDKK

SEQ ID NO: 4575 - protein, 12 aa, Homo Sapien
DADETKEWIEEK

SEQ ID NO: 4576 - protein, 12 aa, Homo Sapien
DAEEHVEAVNSK

SEQ ID NO: 4577 - protein, 12 aa, Homo Sapien
DAFAGKLPEPSK

SEQ ID NO: 4578 - protein, 19 aa, Homo Sapien
DAGEGLLAVQITDPEGKPK

SEQ ID NO: 4579 - protein, 9 aa, Homo Sapien
DAHSNLLAK

SEQ ID NO: 4580 - protein, 10 aa, Homo Sapien
DAISIFHYAK

SEQ ID NO: 4581 - protein, 13 aa, Homo Sapien
DALNQATSQVESK

SEQ ID NO: 4582 - protein, 12 aa, Homo Sapien
DANNLASEVKYK

SEQ ID NO: 4583 - protein, 13 aa, Homo Sapien
DAPMFVMGVNHEK

SEQ ID NO: 4584 - protein, 17 aa, Homo Sapien
DAQVVQVVLDGLSNILK

SEQ ID NO: 4585 - protein, 11 aa, Homo Sapien
DAVEDLESVGK

SEQ ID NO: 4586 - protein, 7 aa, Homo Sapien
DAWLNHK

SEQ ID NO: 4587 - protein, 13 aa, Homo Sapien
DEILPTTPISEQK

SEQ ID NO: 4588 - protein, 19 aa, Homo Sapien
DELHIVEAEAMNYEGSPIK

SEQ ID NO: 4589 - protein, 11 aa, Homo Sapien
DENVIVPEEIK

SEQ ID NO: 4590 - protein, 15 aa, Homo Sapien
DEYEAPTIVLDPTIK

SEQ ID NO: 4591 - protein, 16 aa, Homo Sapien
DFHYIVFGAPGTYNWK

SEQ ID NO: 4592 - protein, 8 aa, Homo Sapien
DFLIPIGK

SEQ ID NO: 4593 - protein, 16 aa, Homo Sapien
DFNMPLTISSLKDGGK

SEQ ID NO: 4594 - protein, 14 aa, Homo Sapien
DFTVSALHGDMDQK

SEQ ID NO: 4595 - protein, 8 aa, Homo Sapien
DGALVQPK

SEQ ID NO: 4596 - protein, 10 aa, Homo Sapien
DGEPVQGLTK

SEQ ID NO: 4597 - protein, 10 aa, Homo Sapien
DGETLEELMK

SEQ ID NO: 4598 - protein, 16 aa, Homo Sapien
DGHFTLFAPTNEAFEK

SEQ ID NO: 4599 - protein, 18 aa, Homo Sapien
DGIDDESYGQIFKPIISK

SEQ ID NO: 4600 - protein, 27 aa, Homo Sapien
DGIEPGHIPGTVNIPFTDFLSQEGLEK

SEQ ID NO: 4601 - protein, 11 aa, Homo Sapien
DGLAEDLAALK

SEQ ID NO: 4602 - protein, 11 aa, Homo Sapien
DGLAFNALIHK

SEQ ID NO: 4603 - protein, 11 aa, Homo Sapien
DGMAFNALIHK

SEQ ID NO: 4604 - protein, 10 aa, Homo Sapien
DGNDLHMTYK

SEQ ID NO: 4605 - protein, 21 aa, Homo Sapien
DGPLNMILDDGGDLTNLIHTK

SEQ ID NO: 4606 - protein, 13 aa, Homo Sapien
DGQAMLWDLNEGK

SEQ ID NO: 4607 - protein, 10 aa, Homo Sapien
DGQELTLGSK

SEQ ID NO: 4608 - protein, 12 aa, Homo Sapien
DGVIEASINHEK

SEQ ID NO: 4609 - protein, 14 aa, Homo Sapien
DGVLTLANNVTPAK

SEQ ID NO: 4610 - protein, 26 aa, Homo Sapien
DHSVAESLNYVASWNMSMLQTQDLVK

SEQ ID NO: 4611 - protein, 7 aa, Homo Sapien
DHYIVQK

SEQ ID NO: 4612 - protein, 9 aa, Homo Sapien
DIFQEIFDK

SEQ ID NO: 4613 - protein, 12 aa, Homo Sapien
DIFQEIFDKHYK

SEQ ID NO: 4614 - protein, 13 aa, Homo Sapien
DIQENDEEAVQVK

SEQ ID NO: 4615 - protein, 15 aa, Homo Sapien
DKFEPGILQLSQWFK

SEQ ID NO: 4616 - protein, 16 aa, Homo Sapien
DKFESSFSHKPSLFNK

SEQ ID NO: 4617 - protein, 10 aa, Homo Sapien
DKGEYTLVVK

SEQ ID NO: 4618 - protein, 9 aa, Homo Sapien
DKLSGEYEK

SEQ ID NO: 4619 - protein, 18 aa, Homo Sapien
DKPTYDEIFYTLSPVNGK

SEQ ID NO: 4620 - protein, 8 aa, Homo Sapien
DKTIIMWK

SEQ ID NO: 4621 - protein, 8 aa, Homo Sapien
DLAALEDK

SEQ ID NO: 4622 - protein, 10 aa, Homo Sapien
DLAALEDKVK

SEQ ID NO: 4623 - protein, 10 aa, Homo Sapien
DLASVNNLLK

SEQ ID NO: 4624 - protein, 12 aa, Homo Sapien
DLAVAGPEMQVK

SEQ ID NO: 4625 - protein, 15 aa, Homo Sapien
DLDIIDNYDYSHTVK

SEQ ID NO: 4626 - protein, 18 aa, Homo Sapien
DLEEAGGLGTEFSELPGK

SEQ ID NO: 4627 - protein, 13 aa, Homo Sapien
DLFEDELVPLFEK

SEQ ID NO: 4628 - protein, 11 aa, Homo Sapien
DLFPYEESKEK

SEQ ID NO: 4629 - protein, 22 aa, Homo Sapien
DLGLSESGEDVNAAILDESGKK

SEQ ID NO: 4630 - protein, 10 aa, Homo Sapien
DLIGVQNLLK

SEQ ID NO: 4631 - protein, 8 aa, Homo Sapien
DLKDYFSK

SEQ ID NO: 4632 - protein, 16 aa, Homo Sapien
DLKPENILLDEEGHIK

SEQ ID NO: 4633 - protein, 24 aa, Homo Sapien
DLKPENLLIDQQGYIQVTDFGFAK

SEQ ID NO: 4634 - protein, 24 aa, Homo Sapien
DLKPENLLIDQQGYLQVTDFGFAK

SEQ ID NO: 4635 - protein, 12 aa, Homo Sapien
DLKSELSGNFEK

SEQ ID NO: 4636 - protein, 9 aa, Homo Sapien
DLLFILTAK

SEQ ID NO: 4637 - protein, 9 aa, Homo Sapien
DLLQAAQDK

SEQ ID NO: 4638 - protein, 14 aa, Homo Sapien
DLNSDMDSILASLK

SEQ ID NO: 4639 - protein, 21 aa, Homo Sapien
DLNSQADSLMTSSAFDTSQVK

SEQ ID NO: 4640 - protein, 14 aa, Homo Sapien
DLPAVSEKDIQDLK

SEQ ID NO: 4641 - protein, 15 aa, Homo Sapien
DLPETLNELHLDHNK

SEQ ID NO: 4642 - protein, 15 aa, Homo Sapien
DLPPDTTLLDLQNNK

SEQ ID NO: 4643 - protein, 11 aa, Homo Sapien
DLSSVQTLLTK

SEQ ID NO: 4644 - protein, 16 aa, Homo Sapien
DLTLDQAYSYAVENAK

SEQ ID NO: 4645 - protein, 10 aa, Homo Sapien
DLTNVQNLQK

SEQ ID NO: 4646 - protein, 10 aa, Homo Sapien
DLTSWVTEMK

SEQ ID NO: 4647 - protein, 13 aa, Homo Sapien
DLYEDELVPLFEK

SEQ ID NO: 4648 - protein, 8 aa, Homo Sapien
DMELPTEK

SEQ ID NO: 4649 - protein, 14 aa, Homo Sapien
DMLEAGILDTYLGK

SEQ ID NO: 4650 - protein, 17 aa, Homo Sapien
DMLLTLHQHLDLSSSEK

SEQ ID NO: 4651 - protein, 12 aa, Homo Sapien
DMVGIAQTGSGK

SEQ ID NO: 4652 - protein, 21 aa, Homo Sapien
DNFGIVEGLMTTVHAITATQK

SEQ ID NO: 4653 - protein, 11 aa, Homo Sapien
DNFNVDEIFLK

SEQ ID NO: 4654 - protein, 15 aa, Homo Sapien
DNGKHALIIYDDLSK

SEQ ID NO: 4655 - protein, 10 aa, Homo Sapien
DNTNEIYSGK

SEQ ID NO: 4656 - protein, 26 aa, Homo Sapien
DNYVPEVSALDQEIIEVDPDTKEMLK

SEQ ID NO: 4657 - protein, 19 aa, Homo Sapien
DPFDKPSQPGELEILSISK

SEQ ID NO: 4658 - protein, 10 aa, Homo Sapien
DPLHPPGPPK

SEQ ID NO: 4659 - protein, 10 aa, Homo Sapien
DPNSPLYSVK

SEQ ID NO: 4660 - protein, 21 aa, Homo Sapien
DPNTYFIVGTAMVYPEEAEPK

SEQ ID NO: 4661 - protein, 20 aa, Homo Sapien
DPPTWSVLAGHSHTVSDSIK

SEQ ID NO: 4662 - protein, 10 aa, Homo Sapien
DPQALSEHLK

SEQ ID NO: 4663 - protein, 28 aa, Homo Sapien
DPVQVAAPSDHGVGIEPVFPENTENSEK

SEQ ID NO: 4664 - protein, 9 aa, Homo Sapien
DQALNLLNK

SEQ ID NO: 4665 - protein, 26 aa, Homo Sapien
DQAVENILVSPVVVASSLGLVSLGGK

SEQ ID NO: 4666 - protein, 14 aa, Homo Sapien
DQDLEPGAPSMGAK

SEQ ID NO: 4667 - protein, 7 aa, Homo Sapien
DQHEWTK

SEQ ID NO: 4668 - protein, 9 aa, Homo Sapien
DQNVFVAQK

SEQ ID NO: 4669 - protein, 17 aa, Homo Sapien
DQSAVVVQGLPEGVAFK

SEQ ID NO: 4670 - protein, 8 aa, Homo Sapien
DSAHGFLK

SEQ ID NO: 4671 - protein, 12 aa, Homo Sapien
DSDELKSWVNEK

SEQ ID NO: 4672 - protein, 10 aa, Homo Sapien
DSDLSHVQNK

SEQ ID NO: 4673 - protein, 10 aa, Homo Sapien
DSDYYNMLLK

SEQ ID NO: 4674 - protein, 9 aa, Homo Sapien
DSELHESWK

SEQ ID NO: 4675 - protein, 18 aa, Homo Sapien
DSFSDPYAIVSFLHQSQK

SEQ ID NO: 4676 - protein, 18 aa, Homo Sapien
DSIFSNLTGQLDYQGFEK

SEQ ID NO: 4677 - protein, 8 aa, Homo Sapien
DSMVLGWK

SEQ ID NO: 4678 - protein, 10 aa, Homo Sapien
DSQTQAILTK

SEQ ID NO: 4679 - protein, 12 aa, Homo Sapien
DSSTWLTAFVLK

SEQ ID NO: 4680 - protein, 18 aa, Homo Sapien
DSVVLNFNPFMAFNPDPK

SEQ ID NO: 4681 - protein, 11 aa, Homo Sapien
DTEQVDNWMSK

SEQ ID NO: 4682 - protein, 13 aa, Homo Sapien
DTLQSELVGQLYK

SEQ ID NO: 4683 - protein, 19 aa, Homo Sapien
DTLVQGLNEAGDDLEAVAK

SEQ ID NO: 4684 - protein, 19 aa, Homo Sapien
DTSEDIEELVEPVAAHGPK

SEQ ID NO: 4685 - protein, 10 aa, Homo Sapien
DTVEVALEDK

SEQ ID NO: 4686 - protein, 12 aa, Homo Sapien
DVDEIEAWISEK

SEQ ID NO: 4687 - protein, 10 aa, Homo Sapien
DVDETISWIK

SEQ ID NO: 4688 - protein, 12 aa, Homo Sapien
DVDFELIKVEGK

SEQ ID NO: 4689 - protein, 15 aa, Homo Sapien
DVDIIDHHDNTYTVK

SEQ ID NO: 4690 - protein, 13 aa, Homo Sapien
DVILDDLSLTGEK

SEQ ID NO: 4691 - protein, 20 aa, Homo Sapien
DVLEGYNGTIFAYGQTSSGK

SEQ ID NO: 4692 - protein, 14 aa, Homo Sapien
DVMEGSAMLIQEAK

SEQ ID NO: 4693 - protein, 10 aa, Homo Sapien
DVNAAIAAIK

SEQ ID NO: 4694 - protein, 16 aa, Homo Sapien
DVSSVELLMNNHQGIK

SEQ ID NO: 4695 - protein, 14 aa, Homo Sapien
DVTPPPETEVVLIK

SEQ ID NO: 4696 - protein, 12 aa, Homo Sapien
DVYDQGGEQAIK

SEQ ID NO: 4697 - protein, 13 aa, Homo Sapien
DYLSHQVPISFHK

SEQ ID NO: 4698 - protein, 9 aa, Homo Sapien
DYNVTANSK

SEQ ID NO: 4699 - protein, 7 aa, Homo Sapien
DYSKYYK

SEQ ID NO: 4700 - protein, 9 aa, Homo Sapien
DYSVTANSK

SEQ ID NO: 4701 - protein, 13 aa, Homo Sapien
DYVSQFEGSALGK

SEQ ID NO: 4702 - protein, 10 aa, Homo Sapien
EADDIVNWLK

SEQ ID NO: 4703 - protein, 22 aa, Homo Sapien
EADIDGDGQVNYEEFVQMMTAK

SEQ ID NO: 4704 - protein, 12 aa, Homo Sapien
EAEGAPQVEAGK

SEQ ID NO: 4705 - protein, 16 aa, Homo Sapien
EAGAGGLAIAVEGPSK

SEQ ID NO: 4706 - protein, 18 aa, Homo Sapien
EAGELKPEEEITVGPVQK

SEQ ID NO: 4707 - protein, 19 aa, Homo Sapien
EAGENWQENPETYEDSFYK

SEQ ID NO: 4708 - protein, 31 aa, Homo Sapien
EAGFPPGVVNIVPGYGPTAGAAISSHMDIDK

SEQ ID NO: 4709 - protein, 13 aa, Homo Sapien
EAGGKEDAEAELK

SEQ ID NO: 4710 - protein, 14 aa, Homo Sapien
EAIQHPADEKLQEK

SEQ ID NO: 4711 - protein, 21 aa, Homo Sapien
EAIVTSEELGQDLEHVEVLQK

SEQ ID NO: 4712 - protein, 14 aa, Homo Sapien
EALENANTNTEVLK

SEQ ID NO: 4713 - protein, 19 aa, Homo Sapien
EALGHLSLAEVGTEEFLQK

SEQ ID NO: 4714 - protein, 15 aa, Homo Sapien
EALLGVQEDVDEYVK

SEQ ID NO: 4715 - protein, 12 aa, Homo Sapien
EAMEDGEIDGNK

SEQ ID NO: 4716 - protein, 21 aa, Homo Sapien
EAMEDGEIDGNKVTLDWAKPK

SEQ ID NO: 4717 - protein, 11 aa, Homo Sapien
EANLLMQNLNK

SEQ ID NO: 4718 - protein, 10 aa, Homo Sapien
EAQADKYSTK

SEQ ID NO: 4719 - protein, 12 aa, Homo Sapien
EASIDILHSIVK

SEQ ID NO: 4720 - protein, 9 aa, Homo Sapien
EATADDLIK

SEQ ID NO: 4721 - protein, 11 aa, Homo Sapien
EAVGDLLDAFK

SEQ ID NO: 4722 - protein, 15 aa, Homo Sapien
EAYPEEAYIADLDAK

SEQ ID NO: 4723 - protein, 20 aa, Homo Sapien
EDAQVAAEILEIADTPSGDK

SEQ ID NO: 4724 - protein, 9 aa, Homo Sapien
EDAVLEYLK

SEQ ID NO: 4725 - protein, 9 aa, Homo Sapien
EDAVSAAFK

SEQ ID NO: 4726 - protein, 13 aa, Homo Sapien
EDDLNSFNATDLK

SEQ ID NO: 4727 - protein, 14 aa, Homo Sapien
EDFASNEVVYYNAK

SEQ ID NO: 4728 - protein, 8 aa, Homo Sapien
EDIFYTSK

SEQ ID NO: 4729 - protein, 14 aa, Homo Sapien
EDQGEYSFVIDGKK

SEQ ID NO: 4730 - protein, 13 aa, Homo Sapien
EDSVKPGAHLTVK

SEQ ID NO: 4731 - protein, 13 aa, Homo Sapien
EDTIVSQTQDFTK

SEQ ID NO: 4732 - protein, 12 aa, Homo Sapien
EDTPNSVWEPAK

SEQ ID NO: 4733 - protein, 11 aa, Homo Sapien
EDTQTLQSLQK

SEQ ID NO: 4734 - protein, 7 aa, Homo Sapien
EEALGDK

SEQ ID NO: 4735 - protein, 25 aa, Homo Sapien
EEDDVVSEDLVQQDVQDLYEAGELK

SEQ ID NO: 4736 - protein, 9 aa, Homo Sapien
EEETLDTIK

SEQ ID NO: 4737 - protein, 12 aa, Homo Sapien
EEIFGPVMQILK

SEQ ID NO: 4738 - protein, 9 aa, Homo Sapien
EELTLEGIK

SEQ ID NO: 4739 - protein, 10 aa, Homo Sapien
EESESVLTLK

SEQ ID NO: 4740 - protein, 13 aa, Homo Sapien
EESGKPGAHVTVK

SEQ ID NO: 4741 - protein, 11 aa, Homo Sapien
EFGPVVIDYGK

SEQ ID NO: 4742 - protein, 13 aa, Homo Sapien
EFHLNESGDPSSK

SEQ ID NO: 4743 - protein, 11 aa, Homo Sapien
EFHTTGLAWSK

SEQ ID NO: 4744 - protein, 8 aa, Homo Sapien
EFIEKYDK

SEQ ID NO: 4745 - protein, 9 aa, Homo Sapien
EFNQFAEGK

SEQ ID NO: 4746 - protein, 17 aa, Homo Sapien
EFPGFLENQKDPLAVDK

SEQ ID NO: 4747 - protein, 12 aa, Homo Sapien
EFSPFGSITSAK

SEQ ID NO: 4748 - protein, 12 aa, Homo Sapien
EFSPFGTITSAK

SEQ ID NO: 4749 - protein, 9 aa, Homo Sapien
EFTEAVEAK

SEQ ID NO: 4750 - protein, 13 aa, Homo Sapien
EFVNLYSDYILNK

SEQ ID NO: 4751 - protein, 20 aa, Homo Sapien
EGDIIPPLTGATPPLIGHLK

SEQ ID NO: 4752 - protein, 10 aa, Homo Sapien
EGDLLFTVAK

SEQ ID NO: 4753 - protein, 15 aa, Homo Sapien
EGEDMIAEEHFGSEK

SEQ ID NO: 4754 - protein, 17 aa, Homo Sapien
EGEEAGPGDPLLEAVPK

SEQ ID NO: 4755 - protein, 9 aa, Homo Sapien
EGEFVAQFK

SEQ ID NO: 4756 - protein, 10 aa, Homo Sapien
EGGTVVYGGK

SEQ ID NO: 4757 - protein, 10 aa, Homo Sapien
EGLDDQGLTK

SEQ ID NO: 4758 - protein, 15 aa, Homo Sapien
EGLMTTVHAITATQK

SEQ ID NO: 4759 - protein, 40 aa, Homo Sapien
EGLYFNPYFPGQAIAMAPPIYTDVLEFDDGTPATMSQIAK

SEQ ID NO: 4760 - protein, 17 aa, Homo Sapien
EGMQLISEKPETEAVVK

SEQ ID NO: 4761 - protein, 23 aa, Homo Sapien
EGNDLYHEMIESGVINLKDATSK

SEQ ID NO: 4762 - protein, 26 aa, Homo Sapien
EGPYDVVVLPGGNLGAQNLSESAAVK

SEQ ID NO: 4763 - protein, 10 aa, Homo Sapien
EGQEDQGLTK

SEQ ID NO: 4764 - protein, 12 aa, Homo Sapien
EGWPSSAYGVTK

SEQ ID NO: 4765 - protein, 13 aa, Homo Sapien
EHDPVGQMVNNPK

SEQ ID NO: 4766 - protein, 31 aa, Homo Sapien
EHGGPEGMDPDGVIESNWNEIVDNFDDMNLK

SEQ ID NO: 4767 - protein, 14 aa, Homo Sapien
EHPTLLTEAPLNPK

SEQ ID NO: 4768 - protein, 9 aa, Homo Sapien
EIAEAYLGK

SEQ ID NO: 4769 - protein, 8 aa, Homo Sapien
EIDAALQK

SEQ ID NO: 4770 - protein, 17 aa, Homo Sapien
EIEELQSQAQALSQEGK

SEQ ID NO: 4771 - protein, 11 aa, Homo Sapien
EIGQSVDEVEK

SEQ ID NO: 4772 - protein, 18 aa, Homo Sapien
EILQEEEDLAEIVQLVGK

SEQ ID NO: 4773 - protein, 11 aa, Homo Sapien
EKNPDMVAGEK

SEQ ID NO: 4774 - protein, 13 aa, Homo Sapien
EKTETLASLEDTK

SEQ ID NO: 4775 - protein, 18 aa, Homo Sapien
EKYGIVDYMIEQSGPPSK

SEQ ID NO: 4776 - protein, 9 aa, Homo Sapien
ELAEQELEK

SEQ ID NO: 4777 - protein, 15 aa, Homo Sapien
ELAQQVQQVADDYGK

SEQ ID NO: 4778 - protein, 16 aa, Homo Sapien
ELATVLSDQPGLLGPK

SEQ ID NO: 4779 - protein, 14 aa, Homo Sapien
ELDMEPYTVAGVAK

SEQ ID NO: 4780 - protein, 14 aa, Homo Sapien
ELDSITPEVLPGWK

SEQ ID NO: 4781 - protein, 17 aa, Homo Sapien
ELDSLQTEAESLDNTVK

SEQ ID NO: 4782 - protein, 12 aa, Homo Sapien
ELISNASDALEK

SEQ ID NO: 4783 - protein, 24 aa, Homo Sapien
ELLESNFTLVGDDGTNKEATSTGK

SEQ ID NO: 4784 - protein, 9 aa, Homo Sapien
ELLTEFGYK

SEQ ID NO: 4785 - protein, 8 aa, Homo Sapien
ELNITAAK

SEQ ID NO: 4786 - protein, 17 aa, Homo Sapien
ELQELNELFKPVVAAQK

SEQ ID NO: 4787 - protein, 13 aa, Homo Sapien
ELSPDIAHLASLK

SEQ ID NO: 4788 - protein, 15 aa, Homo Sapien
EMAKDVIEEHGPSEK

SEQ ID NO: 4789 - protein, 12 aa, Homo Sapien
EMFGLYGQTTGK

SEQ ID NO: 4790 - protein, 8 aa, Homo Sapien
EMTLDEWK

SEQ ID NO: 4791 - protein, 9 aa, Homo Sapien
ENEVLEAWK

SEQ ID NO: 4792 - protein, 11 aa, Homo Sapien
ENLEEEAIIMK

SEQ ID NO: 4793 - protein, 12 aa, Homo Sapien
ENLEQEIAAMNK

SEQ ID NO: 4794 - protein, 16 aa, Homo Sapien
ENSETVVTGSLDDLVK

SEQ ID NO: 4795 - protein, 23 aa, Homo Sapien
ENTEGEYSSLEHESVAGVVESLK

SEQ ID NO: 4796 - protein, 17 aa, Homo Sapien
ENTFLDLTVQQIEHLNK

SEQ ID NO: 4797 - protein, 18 aa, Homo Sapien
EPAHLMSLFGGKPMIIYK

SEQ ID NO: 4798 - protein, 11 aa, Homo Sapien
EPATINYPFEK

SEQ ID NO: 4799 - protein, 15 aa, Homo Sapien
EPGPPGTPFATAISK

SEQ ID NO: 4800 - protein, 15 aa, Homo Sapien
EQLDPDELETITMHK

SEQ ID NO: 4801 - protein, 11 aa, Homo Sapien
EQLEPPEIDMK

SEQ ID NO: 4802 - protein, 14 aa, Homo Sapien
EQQIVIQSSGGLSK

SEQ ID NO: 4803 - protein, 22 aa, Homo Sapien
EQQIVIQSSGGLSKDDIENMVK

SEQ ID NO: 4804 - protein, 13 aa, Homo Sapien
EQSILELGSLLAK

SEQ ID NO: 4805 - protein, 10 aa, Homo Sapien
ESDLNGAQIK

SEQ ID NO: 4806 - protein, 10 aa, Homo Sapien
ESEAVEWQQK

SEQ ID NO: 4807 - protein, 19 aa, Homo Sapien
ESEIIDFFLGASLKDEVLK

SEQ ID NO: 4808 - protein, 12 aa, Homo Sapien
ESGVELFAIGVK

SEQ ID NO: 4809 - protein, 18 aa, Homo Sapien
ESHNSASNVYTVELHIGK

SEQ ID NO: 4810 - protein, 14 aa, Homo Sapien
ESSLTEPVIVGLLK

SEQ ID NO: 4811 - protein, 12 aa, Homo Sapien
ETAASLLQAGYK

SEQ ID NO: 4812 - protein, 16 aa, Homo Sapien
ETADTDTADQVMASFK

SEQ ID NO: 4813 - protein, 13 aa, Homo Sapien
ETENDDLTNVIQK

SEQ ID NO: 4814 - protein, 14 aa, Homo Sapien
ETFDVTLEPLSFKK

SEQ ID NO: 4815 - protein, 14 aa, Homo Sapien
ETLLNSATTSLNSK

SEQ ID NO: 4816 - protein, 10 aa, Homo Sapien
ETLQQHKLLK

SEQ ID NO: 4817 - protein, 13 aa, Homo Sapien
EVAFFNNFLTDAK

SEQ ID NO: 4818 - protein, 11 aa, Homo Sapien
EVANSTANLVK

SEQ ID NO: 4819 - protein, 12 aa, Homo Sapien
EVEEDEYKAFYK

SEQ ID NO: 4820 - protein, 16 aa, Homo Sapien
EVENLILENTQLLETK

SEQ ID NO: 4821 - protein, 11 aa, Homo Sapien
EVEVEVESMDK

SEQ ID NO: 4822 - protein, 13 aa, Homo Sapien
EVGEAFTILSDPK

SEQ ID NO: 4823 - protein, 9 aa, Homo Sapien
EVGVAIQEK

SEQ ID NO: 4824 - protein, 9 aa, Homo Sapien
EVGVYEALK

SEQ ID NO: 4825 - protein, 22 aa, Homo Sapien
EVIELPVKHPELFEALGIAQPK

SEQ ID NO: 4826 - protein, 12 aa, Homo Sapien
EVLQEWPLTTVK

SEQ ID NO: 4827 - protein, 18 aa, Homo Sapien
EVMQEVAQLSQFDEELYK

SEQ ID NO: 4828 - protein, 13 aa, Homo Sapien
EVQTNDLKEVVNK

SEQ ID NO: 4829 - protein, 8 aa, Homo Sapien
EVSAYIKK

SEQ ID NO: 4830 - protein, 17 aa, Homo Sapien
EVVLDNVDPAILDLIIK

SEQ ID NO: 4831 - protein, 13 aa, Homo Sapien
EVWFFGLQYQDTK

SEQ ID NO: 4832 - protein, 13 aa, Homo Sapien
EVWFFGLQYVDSK

SEQ ID NO: 4833 - protein, 9 aa, Homo Sapien
EYEAALNSK

SEQ ID NO: 4834 - protein, 12 aa, Homo Sapien
EYELLSDELNQK

SEQ ID NO: 4835 - protein, 17 aa, Homo Sapien
EYGGLDVLVNNAGIAFK

SEQ ID NO: 4836 - protein, 13 aa, Homo Sapien
EYQISAGDFPEVK

SEQ ID NO: 4837 - protein, 7 aa, Homo Sapien
EYTIVVK

SEQ ID NO: 4838 - protein, 7 aa, Homo Sapien
EYTLVVK

SEQ ID NO: 4839 - protein, 13 aa, Homo Sapien
FAALEKPTTLELK

SEQ ID NO: 4840 - protein, 19 aa, Homo Sapien
FAAYFQQGDMESNGKYITK

SEQ ID NO: 4841 - protein, 14 aa, Homo Sapien
FADEHVPGSPFTVK

SEQ ID NO: 4842 - protein, 14 aa, Homo Sapien
FADQHVPGSPFSVK

SEQ ID NO: 4843 - protein, 8 aa, Homo Sapien
FAFDYATK

SEQ ID NO: 4844 - protein, 16 aa, Homo Sapien
FALPTAHHTLGLPVGK

SEQ ID NO: 4845 - protein, 11 aa, Homo Sapien
FDDAVVQSDMK

SEQ ID NO: 4846 - protein, 9 aa, Homo Sapien
FDILDQEMK

SEQ ID NO: 4847 - protein, 10 aa, Homo Sapien
FDVINLAAEK

SEQ ID NO: 4848 - protein, 15 aa, Homo Sapien
FDVQFPENNWINPDK

SEQ ID NO: 4849 - protein, 10 aa, Homo Sapien
FDVQLKDLEK

SEQ ID NO: 4850 - protein, 10 aa, Homo Sapien
FDVSGYPTIK

SEQ ID NO: 4851 - protein, 10 aa, Homo Sapien
FDVSGYPTLK

SEQ ID NO: 4852 - protein, 8 aa, Homo Sapien
FEMTEQEK

SEQ ID NO: 4853 - protein, 16 aa, Homo Sapien
FENEMATAASSSSLEK

SEQ ID NO: 4854 - protein, 7 aa, Homo Sapien
FFATFDK

SEQ ID NO: 4855 - protein, 26 aa, Homo Sapien
FFEEVNDPAKNDALEMVEETTWQGLK

SEQ ID NO: 4856 - protein, 13 aa, Homo Sapien
FFVTTLPAFFHAK

SEQ ID NO: 4857 - protein, 17 aa, Homo Sapien
FGAVWTGDNTAEWDHLK

SEQ ID NO: 4858 - protein, 13 aa, Homo Sapien
FGELGGFAAIQAK

SEQ ID NO: 4859 - protein, 14 aa, Homo Sapien
FGFPEGSVELYAEK

SEQ ID NO: 4860 - protein, 10 aa, Homo Sapien
FGGALDAAAK

SEQ ID NO: 4861 - protein, 14 aa, Homo Sapien
FGIQAQMVTTDFQK

SEQ ID NO: 4862 - protein, 16 aa, Homo Sapien
FGPYYTEPVIAGLDPK

SEQ ID NO: 4863 - protein, 14 aa, Homo Sapien
FGTLLSGSWDTTAK

SEQ ID NO: 4864 - protein, 15 aa, Homo Sapien
FGVSETTGLTPDQVK

SEQ ID NO: 4865 - protein, 11 aa, Homo Sapien
FHHTFSTEIAK

SEQ ID NO: 4866 - protein, 19 aa, Homo Sapien
FIGMESAGIHETTYNSIMK

SEQ ID NO: 4867 - protein, 8 aa, Homo Sapien
FIIPQIVK

SEQ ID NO: 4868 - protein, 14 aa, Homo Sapien
FIPHENGVHSIDVK

SEQ ID NO: 4869 - protein, 26 aa, Homo Sapien
FISNPNSIILAVTAANTDMATSEALK

SEQ ID NO: 4870 - protein, 8 aa, Homo Sapien
FKDPNAPK

SEQ ID NO: 4871 - protein, 14 aa, Homo Sapien
FKGPFTDVVTTNLK

SEQ ID NO: 4872 - protein, 10 aa, Homo Sapien
FKPTLSQQQK

SEQ ID NO: 4873 - protein, 10 aa, Homo Sapien
FLDGIYVSEK

SEQ ID NO: 4874 - protein, 13 aa, Homo Sapien
FLESPDFQPSIAK

SEQ ID NO: 4875 - protein, 22 aa, Homo Sapien
FLFGGLAGMGATVFVQPLDLVK

SEQ ID NO: 4876 - protein, 11 aa, Homo Sapien
FLSDVYPDGFK

SEQ ID NO: 4877 - protein, 8 aa, Homo Sapien
FLTGYEVK

SEQ ID NO: 4878 - protein, 8 aa, Homo Sapien
FMEQVIFK

SEQ ID NO: 4879 - protein, 13 aa, Homo Sapien
FMIELDGTENKSK

SEQ ID NO: 4880 - protein, 12 aa, Homo Sapien
FNGSHVVGSPFK

SEQ ID NO: 4881 - protein, 10 aa, Homo Sapien
FNQLPVELKK

SEQ ID NO: 4882 - protein, 11 aa, Homo Sapien
FPKAEFAEVSK

SEQ ID NO: 4883 - protein, 8 aa, Homo Sapien
FPLFGGWK

SEQ ID NO: 4884 - protein, 14 aa, Homo Sapien
FPSLLTHNENMVAK

SEQ ID NO: 4885 - protein, 11 aa, Homo Sapien
FQGPDNGQGPK

SEQ ID NO: 4886 - protein, 9 aa, Homo Sapien
FQIATVTEK

SEQ ID NO: 4887 - protein, 16 aa, Homo Sapien
FQIQDISVETEDNKEK

SEQ ID NO: 4888 - protein, 14 aa, Homo Sapien
FQVHQMLNEMDELK

SEQ ID NO: 4889 - protein, 17 aa, Homo Sapien
FQVHQMLNEMDELKELK

SEQ ID NO: 4890 - protein, 9 aa, Homo Sapien
FQYDSTHGK

SEQ ID NO: 4891 - protein, 14 aa, Homo Sapien
FSHGTHEYHAETIK

SEQ ID NO: 4892 - protein, 17 aa, Homo Sapien
FSIENEGTYTVQIHDGK

SEQ ID NO: 4893 - protein, 7 aa, Homo Sapien
FSMPGFK

SEQ ID NO: 4894 - protein, 19 aa, Homo Sapien
FSMPGFKAEGPEVDVNLPK

SEQ ID NO: 4895 - protein, 8 aa, Homo Sapien
FSNISAAK

SEQ ID NO: 4896 - protein, 15 aa, Homo Sapien
FSSPVDMLGVVLAKK

SEQ ID NO: 4897 - protein, 12 aa, Homo Sapien
FTATASLGVIHK

SEQ ID NO: 4898 - protein, 9 aa, Homo Sapien
FTEYETQVK

SEQ ID NO: 4899 - protein, 10 aa, Homo Sapien
FTFGLDWVPK

SEQ ID NO: 4900 - protein, 15 aa, Homo Sapien
FTISDHPQPIDPLLK

SEQ ID NO: 4901 - protein, 22 aa, Homo Sapien
FTLGSVAGAVGATAVYPIDLVK

SEQ ID NO: 4902 - protein, 10 aa, Homo Sapien
FTQQDIDEAK

SEQ ID NO: 4903 - protein, 9 aa, Homo Sapien
FVETLHITK

SEQ ID NO: 4904 - protein, 11 aa, Homo Sapien
FVLPLQDHTIK

SEQ ID NO: 4905 - protein, 10 aa, Homo Sapien
FVNLGIEPPK

SEQ ID NO: 4906 - protein, 30 aa, Homo Sapien
FVSAIEGMHPNQEDHETFVDINPLTGIILK

SEQ ID NO: 4907 - protein, 13 aa, Homo Sapien
FVTAVGTQGAISK

SEQ ID NO: 4908 - protein, 11 aa, Homo Sapien
FYAPELLFFAK

SEQ ID NO: 4909 - protein, 15 aa, Homo Sapien
FYAYNPLAGGLLTGK

SEQ ID NO: 4910 - protein, 9 aa, Homo Sapien
FYFENALSK

SEQ ID NO: 4911 - protein, 9 aa, Homo Sapien
FYGDEEKDK

SEQ ID NO: 4912 - protein, 12 aa, Homo Sapien
FYTLIPHDFGMK

SEQ ID NO: 4913 - protein, 8 aa, Homo Sapien
FYYIYNEK

SEQ ID NO: 4914 - protein, 13 aa, Homo Sapien
GAAPNVVYTYTGK

SEQ ID NO: 4915 - protein, 9 aa, Homo Sapien
GAEVYHNLK

SEQ ID NO: 4916 - protein, 18 aa, Homo Sapien
GAGIGGLGITVEGPSESK

SEQ ID NO: 4917 - protein, 18 aa, Homo Sapien
GAGTGGLGLAVEGPSEAK

SEQ ID NO: 4918 - protein, 12 aa, Homo Sapien
GALPLDTVTFYK

SEQ ID NO: 4919 - protein, 16 aa, Homo Sapien
GALQYLVPILTQTLTK

SEQ ID NO: 4920 - protein, 17 aa, Homo Sapien
GANAVGYTNYPDNVVFK

SEQ ID NO: 4921 - protein, 15 aa, Homo Sapien
GAPVGGHILSYLLEK

SEQ ID NO: 4922 - protein, 20 aa, Homo Sapien
GATELTHEDYMEGILEVQAK

SEQ ID NO: 4923 - protein, 16 aa, Homo Sapien
GATYGKPVHHGVNQLK

SEQ ID NO: 4924 - protein, 13 aa, Homo Sapien
GAVASVTFDDFHK

SEQ ID NO: 4925 - protein, 30 aa, Homo Sapien
GAVDDDVAEADIISTVEFNHSGELLATGDK

SEQ ID NO: 4926 - protein, 9 aa, Homo Sapien
GAVIATELK

SEQ ID NO: 4927 - protein, 12 aa, Homo Sapien
GAVYSMVEFNGK

SEQ ID NO: 4928 - protein, 11 aa, Homo Sapien
GDAMIMEETGK

SEQ ID NO: 4929 - protein, 21 aa, Homo Sapien
GDEGGFAPNILENNEALELLK

SEQ ID NO: 4930 - protein, 13 aa, Homo Sapien
GDELADSALEIFK

SEQ ID NO: 4931 - protein, 14 aa, Homo Sapien
GDFVTSFYWPWQTK

SEQ ID NO: 4932 - protein, 16 aa, Homo Sapien
GDVVLQSDHVIETLTK

SEQ ID NO: 4933 - protein, 8 aa, Homo Sapien
GDYILIVK

SEQ ID NO: 4934 - protein, 14 aa, Homo Sapien
GEATVSFDDPPSAK

SEQ ID NO: 4935 - protein, 10 aa, Homo Sapien
GEFTIETEGK

SEQ ID NO: 4936 - protein, 11 aa, Homo Sapien
GEIDAHEDSFK

SEQ ID NO: 4937 - protein, 20 aa, Homo Sapien
GEPETFLPLDYLEVKPTDEK

SEQ ID NO: 4938 - protein, 13 aa, Homo Sapien
GESKDLLFILTAK

SEQ ID NO: 4939 - protein, 15 aa, Homo Sapien
GFAFVTFDDHDSVDK

SEQ ID NO: 4940 - protein, 15 aa, Homo Sapien
GFAFVTFDDHDTVDK

SEQ ID NO: 4941 - protein, 14 aa, Homo Sapien
GFALVGVGSEASSK

SEQ ID NO: 4942 - protein, 9 aa, Homo Sapien
GFIMAEVMK

SEQ ID NO: 4943 - protein, 12 aa, Homo Sapien
GFPTIYFSPANK

SEQ ID NO: 4944 - protein, 13 aa, Homo Sapien
GFPTIYFSPANKK

SEQ ID NO: 4945 - protein, 9 aa, Homo Sapien
GFSGLDGAK

SEQ ID NO: 4946 - protein, 18 aa, Homo Sapien
GFSGLDGAKGDAGPAGPK

SEQ ID NO: 4947 - protein, 9 aa, Homo Sapien
GFVEIQTPK

SEQ ID NO: 4948 - protein, 22 aa, Homo Sapien
GGAEVQIFAPDVPQMHVIDHTK

SEQ ID NO: 4949 - protein, 18 aa, Homo Sapien
GGFAPNILENNEALELLK

SEQ ID NO: 4950 - protein, 11 aa, Homo Sapien
GGGEYGETWHK

SEQ ID NO: 4951 - protein, 17 aa, Homo Sapien
GGGSHPLLVPYDTLTAK

SEQ ID NO: 4952 - protein, 19 aa, Homo Sapien
GGGSHPLLVPYDTLTAKEK

SEQ ID NO: 4953 - protein, 19 aa, Homo Sapien
GGLSTFFEAQDALSAIHQK

SEQ ID NO: 4954 - protein, 14 aa, Homo Sapien
GGNNSFTHEALTLK

SEQ ID NO: 4955 - protein, 15 aa, Homo Sapien
GGNTMTGDAIDYLVK

SEQ ID NO: 4956 - protein, 15 aa, Homo Sapien
GGQTHLGLPVFNTVK

SEQ ID NO: 4957 - protein, 17 aa, Homo Sapien
GGSDDSSKDPIDVNYEK

SEQ ID NO: 4958 - protein, 20 aa, Homo Sapien
GGSGSHNWGTVKDELTESPK

SEQ ID NO: 4959 - protein, 14 aa, Homo Sapien
GGSTTGSQFLEQFK

SEQ ID NO: 4960 - protein, 13 aa, Homo Sapien
GHFYGHLDFNLDK

SEQ ID NO: 4961 - protein, 16 aa, Homo Sapien
GHTDSVQDISFDHSGK

SEQ ID NO: 4962 - protein, 18 aa, Homo Sapien
GHVTQDAPIPGSPLYTIK

SEQ ID NO: 4963 - protein, 8 aa, Homo Sapien
GIAYIEFK

SEQ ID NO: 4964 - protein, 19 aa, Homo Sapien
GIDIHGVPYVINVTLPDEK

SEQ ID NO: 4965 - protein, 18 aa, Homo Sapien
GIGIENIHYLNDGLWHMK

SEQ ID NO: 4966 - protein, 9 aa, Homo Sapien
GIGPTYSSK

SEQ ID NO: 4967 - protein, 13 aa, Homo Sapien
GIHPTIISESFQK

SEQ ID NO: 4968 - protein, 11 aa, Homo Sapien
GIPEFWLTVFK

SEQ ID NO: 4969 - protein, 18 aa, Homo Sapien
GISAFLVPMPTPGLTLGK

SEQ ID NO: 4970 - protein, 9 aa, Homo Sapien
GITAFIVEK

SEQ ID NO: 4971 - protein, 12 aa, Homo Sapien
GITFDSGGISIK

SEQ ID NO: 4972 - protein, 21 aa, Homo Sapien
GITLHPELFSIDNGLLTPTMK

SEQ ID NO: 4973 - protein, 19 aa, Homo Sapien
GIVDQSQQAYQEAFEISKK

SEQ ID NO: 4974 - protein, 18 aa, Homo Sapien
GIVEGLMTTVHAITATQK

SEQ ID NO: 4975 - protein, 13 aa, Homo Sapien
GIVGVENVAELKK

SEQ ID NO: 4976 - protein, 12 aa, Homo Sapien
GIVYDTGGLSIK

SEQ ID NO: 4977 - protein, 12 aa, Homo Sapien
GKAEAHFSLVHY

SEQ ID NO: 4978 - protein, 12 aa, Homo Sapien
GKDLIGVQNLLK

SEQ ID NO: 4979 - protein, 12 aa, Homo Sapien
GKKPLNALDVMK

SEQ ID NO: 4980 - protein, 9 aa, Homo Sapien
GKWMDLASK

SEQ ID NO: 4981 - protein, 11 aa, Homo Sapien
GKYTFEIFDGK

SEQ ID NO: 4982 - protein, 16 aa, Homo Sapien
GLAPDLPEDLYHLIKK

SEQ ID NO: 4983 - protein, 16 aa, Homo Sapien
GLAPVQAYLHIPDIIK

SEQ ID NO: 4984 - protein, 16 aa, Homo Sapien
GLDVDSLVIEHIQVNK

SEQ ID NO: 4985 - protein, 10 aa, Homo Sapien
GLEVTDDSPK

SEQ ID NO: 4986 - protein, 15 aa, Homo Sapien
GLGSTVQEIDLTGVK

SEQ ID NO: 4987 - protein, 13 aa, Homo Sapien
GLGTETAEFAELK

SEQ ID NO: 4988 - protein, 16 aa, Homo Sapien
GLGWSPAGSLEVEKAK

SEQ ID NO: 4989 - protein, 8 aa, Homo Sapien
GLHQMGIK

SEQ ID NO: 4990 - protein, 10 aa, Homo Sapien
GLLTGPSQLK

SEQ ID NO: 4991 - protein, 14 aa, Homo Sapien
GLMTTVHAITATQK

SEQ ID NO: 4992 - protein, 10 aa, Homo Sapien
GLNEAAIKNV

SEQ ID NO: 4993 - protein, 10 aa, Homo Sapien
GLSFLFPLLK

SEQ ID NO: 4994 - protein, 10 aa, Homo Sapien
GLSQAFVGQK

SEQ ID NO: 4995 - protein, 9 aa, Homo Sapien
GLTSVINQK

SEQ ID NO: 4996 - protein, 13 aa, Homo Sapien
GLVDSEKDAAVAK

SEQ ID NO: 4997 - protein, 10 aa, Homo Sapien
GLVSSDELAK

SEQ ID NO: 4998 - protein, 8 aa, Homo Sapien
GLYPAPLK

SEQ ID NO: 4999 - protein, 15 aa, Homo Sapien
GMYDGPVFDLTTTPK

SEQ ID NO: 5000 - protein, 16 aa, Homo Sapien
GNAMVEEGHFAAEDVK

SEQ ID NO: 5001 - protein, 13 aa, Homo Sapien
GNLEVLLFTIQSK

SEQ ID NO: 5002 - protein, 11 aa, Homo Sapien
GPAGPSGPAGK

SEQ ID NO: 5003 - protein, 11 aa, Homo Sapien
GPAYGLSAEVK

SEQ ID NO: 5004 - protein, 12 aa, Homo Sapien
GPFTDVVTTNLK

SEQ ID NO: 5005 - protein, 15 aa, Homo Sapien
GPIKFNVWDTAGQEK

SEQ ID NO: 5006 - protein, 11 aa, Homo Sapien
GPSGLLTYTGK

SEQ ID NO: 5007 - protein, 9 aa, Homo Sapien
GPSSVEDIK

SEQ ID NO: 5008 - protein, 13 aa, Homo Sapien
GPVGLAIDFPESK

SEQ ID NO: 5009 - protein, 11 aa, Homo Sapien
GPVGPSGPPGK

SEQ ID NO: 5010 - protein, 23 aa, Homo Sapien
GQHVTGSPFQFTVGPLGEGGAHK

SEQ ID NO: 5011 - protein, 9 aa, Homo Sapien
GQLEQITGK

SEQ ID NO: 5012 - protein, 24 aa, Homo Sapien
GQLTTDQVFPYPSVLNEEQTQFLK

SEQ ID NO: 5013 - protein, 12 aa, Homo Sapien
GQSGELAAASGK

SEQ ID NO: 5014 - protein, 11 aa, Homo Sapien
GQTIPEDILGK

SEQ ID NO: 5015 - protein, 16 aa, Homo Sapien
GQTVDQVHHAVNALSK

SEQ ID NO: 5016 - protein, 14 aa, Homo Sapien
GQVPPLVTTNFLVK

SEQ ID NO: 5017 - protein, 12 aa, Homo Sapien
GSAGAPSVENVK

SEQ ID NO: 5018 - protein, 12 aa, Homo Sapien
GSDGAASSYQLK

SEQ ID NO: 5019 - protein, 12 aa, Homo Sapien
GSDSIAYDKGEK

SEQ ID NO: 5020 - protein, 9 aa, Homo Sapien
GSEMVVAGK

SEQ ID NO: 5021 - protein, 11 aa, Homo Sapien
GSIDIDHTQYK

SEQ ID NO: 5022 - protein, 14 aa, Homo Sapien
GSIFVVFDSIESAK

SEQ ID NO: 5023 - protein, 23 aa, Homo Sapien
GSIHDFPGFDPNQDAEALYTAMK

SEQ ID NO: 5024 - protein, 12 aa, Homo Sapien
GSIYSSPGLYSK

SEQ ID NO: 5025 - protein, 17 aa, Homo Sapien
GSNNVALGYDEGSIIVK

SEQ ID NO: 5026 - protein, 9 aa, Homo Sapien
GSSNSYAIK

SEQ ID NO: 5027 - protein, 23 aa, Homo Sapien
GSTGFGQDSILSLPGNVGHQDVK

SEQ ID NO: 5028 - protein, 10 aa, Homo Sapien
GTAAEMVAVK

SEQ ID NO: 5029 - protein, 10 aa, Homo Sapien
GTAVVNGEFK

SEQ ID NO: 5030 - protein, 13 aa, Homo Sapien
GTAYTFFTPGNLK

SEQ ID NO: 5031 - protein, 22 aa, Homo Sapien
GTEAAGAMFLEAIPMSIPPEVK

SEQ ID NO: 5032 - protein, 12 aa, Homo Sapien
GTFVDYQTTVVK

SEQ ID NO: 5033 - protein, 11 aa, Homo Sapien
GTGIVSAPVPK

SEQ ID NO: 5034 - protein, 25 aa, Homo Sapien
GTGLQPGEEELPDIAPPLVTPDEPK

SEQ ID NO: 5035 - protein, 13 aa, Homo Sapien
GTIEILSDVQLIK

SEQ ID NO: 5036 - protein, 8 aa, Homo Sapien
GTLEPVEK

SEQ ID NO: 5037 - protein, 15 aa, Homo Sapien
GTVAYVGATLFATGK

SEQ ID NO: 5038 - protein, 26 aa, Homo Sapien
GTVIDVTDFVNWASSINDAPVLISQK

SEQ ID NO: 5039 - protein, 9 aa, Homo Sapien
GTYDILVTK

SEQ ID NO: 5040 - protein, 22 aa, Homo Sapien
GVDDLDFFIGDEAIEKPTYATK

SEQ ID NO: 5041 - protein, 13 aa, Homo Sapien
GVDEATIIDILTK

SEQ ID NO: 5042 - protein, 13 aa, Homo Sapien
GVDLVLNSLAEEK

SEQ ID NO: 5043 - protein, 15 aa, Homo Sapien
GVEVGKPTHFTVLTK

SEQ ID NO: 5044 - protein, 12 aa, Homo Sapien
GVILYGPPGTGK

SEQ ID NO: 5045 - protein, 15 aa, Homo Sapien
GVIVDKDFSHPQMPK

SEQ ID NO: 5046 - protein, 27 aa, Homo Sapien
GVLIAVLDTGVDPGAPGMQVTTDGKPK

SEQ ID NO: 5047 - protein, 12 aa, Homo Sapien
GVLLFGPPGTGK

SEQ ID NO: 5048 - protein, 12 aa, Homo Sapien
GVLLYGPPGTGK

SEQ ID NO: 5049 - protein, 15 aa, Homo Sapien
GVMLAVDAVIAELKK

SEQ ID NO: 5050 - protein, 12 aa, Homo Sapien
GVNSFMVYMAYK

SEQ ID NO: 5051 - protein, 21 aa, Homo Sapien
GVQYLNEIKDSVVAGFQWATK

SEQ ID NO: 5052 - protein, 20 aa, Homo Sapien
GVSSQETAGIGASAHLVNFK

SEQ ID NO: 5053 - protein, 15 aa, Homo Sapien
GVTSEDSGKYSINIK

SEQ ID NO: 5054 - protein, 11 aa, Homo Sapien
GVVEVTHDLQK

SEQ ID NO: 5055 - protein, 18 aa, Homo Sapien
GVWKPETNEILHMSFPTK

SEQ ID NO: 5056 - protein, 9 aa, Homo Sapien
GWPLYLSTK

SEQ ID NO: 5057 - protein, 11 aa, Homo Sapien
GWVNTLVGGQK

SEQ ID NO: 5058 - protein, 12 aa, Homo Sapien
GYADIVQLLLAK

SEQ ID NO: 5059 - protein, 22 aa, Homo Sapien
GYGYGQGAGTLSTDKGESLGIK

SEQ ID NO: 5060 - protein, 18 aa, Homo Sapien
GYIFLEYASPAHAVDAVK

SEQ ID NO: 5061 - protein, 14 aa, Homo Sapien
GYSFSLTTFSPSGK

SEQ ID NO: 5062 - protein, 20 aa, Homo Sapien
HAAENPGKYNILGTNTIMDK

SEQ ID NO: 5063 - protein, 11 aa, Homo Sapien
HADYIASYGSK

SEQ ID NO: 5064 - protein, 10 aa, Homo Sapien
HAIILLTDGK

SEQ ID NO: 5065 - protein, 10 aa, Homo Sapien
HAPVLELEGK

SEQ ID NO: 5066 - protein, 11 aa, Homo Sapien
HAQSGTIMAVK

SEQ ID NO: 5067 - protein, 9 aa, Homo Sapien
HDVVFLITK

SEQ ID NO: 5068 - protein, 11 aa, Homo Sapien
HEIEMTEKEWK

SEQ ID NO: 5069 - protein, 10 aa, Homo Sapien
HEIVQTLSLK

SEQ ID NO: 5070 - protein, 13 aa, Homo Sapien
HELLQPFNVLYEK

SEQ ID NO: 5071 - protein, 9 aa, Homo Sapien
HEMLPEFYK

SEQ ID NO: 5072 - protein, 11 aa, Homo Sapien
HEVGHIDNSMK

SEQ ID NO: 5073 - protein, 10 aa, Homo Sapien
HEYFMHATDK

SEQ ID NO: 5074 - protein, 11 aa, Homo Sapien
HFDSQVIIYGK

SEQ ID NO: 5075 - protein, 24 aa, Homo Sapien
HFVTISSPLATQIPQAVGAAYAAK

SEQ ID NO: 5076 - protein, 15 aa, Homo Sapien
HGEKIPDMAPPQQAK

SEQ ID NO: 5077 - protein, 8 aa, Homo Sapien
HGLGIETK

SEQ ID NO: 5078 - protein, 13 aa, Homo Sapien
HGTDDGVVWMNWK

SEQ ID NO: 5079 - protein, 30 aa, Homo Sapien
HIADLAGNSEVILPVPAFNVINGGSHAGNK

SEQ ID NO: 5080 - protein, 10 aa, Homo Sapien
HIEIQVLGDK

SEQ ID NO: 5081 - protein, 8 aa, Homo Sapien
HILILQNK

SEQ ID NO: 5082 - protein, 22 aa, Homo Sapien
HITGFDSVDDESKHSGHMFSSK

SEQ ID NO: 5083 - protein, 11 aa, Homo Sapien
HKTDLNHENLK

SEQ ID NO: 5084 - protein, 13 aa, Homo Sapien
HLAEHSPYYEAMK

SEQ ID NO: 5085 - protein, 13 aa, Homo Sapien
HLAGLGLTEAIDK

SEQ ID NO: 5086 - protein, 15 aa, Homo Sapien
HLAGLGLTEAIDKNK

SEQ ID NO: 5087 - protein, 21 aa, Homo Sapien
HLAILGAGLMGAGIAQVSVDK

SEQ ID NO: 5088 - protein, 11 aa, Homo Sapien
HLLEVEDLLQK

SEQ ID NO: 5089 - protein, 11 aa, Homo Sapien
HLLGVEDLLQK

SEQ ID NO: 5090 - protein, 9 aa, Homo Sapien
HLTEYFTFK

SEQ ID NO: 5091 - protein, 13 aa, Homo Sapien
HLVYESDQNKDGK

SEQ ID NO: 5092 - protein, 12 aa, Homo Sapien
HNFTLAFSTAEK

SEQ ID NO: 5093 - protein, 11 aa, Homo Sapien
HPDADSLYVEK

SEQ ID NO: 5094 - protein, 13 aa, Homo Sapien
HPDASVNFSEFSK

SEQ ID NO: 5095 - protein, 9 aa, Homo Sapien
HPEELSLLK

SEQ ID NO: 5096 - protein, 16 aa, Homo Sapien
HPELADKNVPNLHVMK

SEQ ID NO: 5097 - protein, 17 aa, Homo Sapien
HQAFEAEVQANSGAIVK

SEQ ID NO: 5098 - protein, 12 aa, Homo Sapien
HQAFMAELASNK

SEQ ID NO: 5099 - protein, 16 aa, Homo Sapien
HQEHKGEIDAHEDSFK

SEQ ID NO: 5100 - protein, 22 aa, Homo Sapien
HQGVMVGMGQKDCYVGDEAQSK

SEQ ID NO: 5101 - protein, 9 aa, Homo Sapien
HQPTAIIAK

SEQ ID NO: 5102 - protein, 11 aa, Homo Sapien
HQSLEAEVQTK

SEQ ID NO: 5103 - protein, 15 aa, Homo Sapien
HSQFIGYPITLFVEK

SEQ ID NO: 5104 - protein, 8 aa, Homo Sapien
HVAEDLGK

SEQ ID NO: 5105 - protein, 12 aa, Homo Sapien
HVFFVDDFDAFK

SEQ ID NO: 5106 - protein, 9 aa, Homo Sapien
HVLVTLGEK

SEQ ID NO: 5107 - protein, 12 aa, Homo Sapien
HVNPVQALSEFK

SEQ ID NO: 5108 - protein, 13 aa, Homo Sapien
HVPGGGNVQIQNK

SEQ ID NO: 5109 - protein, 16 aa, Homo Sapien
HVSAYGPGLSHGMVNK

SEQ ID NO: 5110 - protein, 20 aa, Homo Sapien
HVSAYGPGLSHGMVNKPATF

SEQ ID NO: 5111 - protein, 8 aa, Homo Sapien
HVTFNQVK

SEQ ID NO: 5112 - protein, 37 aa, Homo Sapien
HVTVIGGGLMGAGIAQVAAATGHTVVLVDQTEDILAK

SEQ ID NO: 5113 - protein, 10 aa, Homo Sapien
HYASEEIKEK

SEQ ID NO: 5114 - protein, 14 aa, Homo Sapien
HYGPGWVSMANAGK

SEQ ID NO: 5115 - protein, 13 aa, Homo Sapien
HYLFYDGESVSGK

SEQ ID NO: 5116 - protein, 10 aa, Homo Sapien
IADNVKDWSK

SEQ ID NO: 5117 - protein, 16 aa, Homo Sapien
IAEQQKAQAEVEGLGK

SEQ ID NO: 5118 - protein, 9 aa, Homo Sapien
IAFAITAIK

SEQ ID NO: 5119 - protein, 21 aa, Homo Sapien
IAGAGLLFVGGGIGGTILYAK

SEQ ID NO: 5120 - protein, 10 aa, Homo Sapien
IAGYVTHLMK

SEQ ID NO: 5121 - protein, 12 aa, Homo Sapien
IAILDIEPQTLK

SEQ ID NO: 5122 - protein, 9 aa, Homo Sapien
IAILGFAFK

SEQ ID NO: 5123 - protein, 9 aa, Homo Sapien
IAIYELLFK

SEQ ID NO: 5124 - protein, 14 aa, Homo Sapien
IANVNKALDYIASK

SEQ ID NO: 5125 - protein, 15 aa, Homo Sapien
IAPPEAPVTGYMFGK

SEQ ID NO: 5126 - protein, 16 aa, Homo Sapien
IAQDLEMYGVNYFSIK

SEQ ID NO: 5127 - protein, 15 aa, Homo Sapien
IAQGNLSNTDVQAAK

SEQ ID NO: 5128 - protein, 13 aa, Homo Sapien
IAQLEEQLDNETK

SEQ ID NO: 5129 - protein, 13 aa, Homo Sapien
IATEKDFLEAVNK

SEQ ID NO: 5130 - protein, 8 aa, Homo Sapien
IATGSFLK

SEQ ID NO: 5131 - protein, 13 aa, Homo Sapien
IAVEPVNPSELPK

SEQ ID NO: 5132 - protein, 9 aa, Homo Sapien
IDDIVSGHK

SEQ ID NO: 5133 - protein, 24 aa, Homo Sapien
IDDPTDSKPEDWDKPEHIPDPDAK

SEQ ID NO: 5134 - protein, 11 aa, Homo Sapien
IDEAILITWTK

SEQ ID NO: 5135 - protein, 10 aa, Homo Sapien
IDEMPEAAVK

SEQ ID NO: 5136 - protein, 15 aa, Homo Sapien
IDEYDYSKPIQGQQK

SEQ ID NO: 5137 - protein, 12 aa, Homo Sapien
IDFVGELNDKMK

SEQ ID NO: 5138 - protein, 14 aa, Homo Sapien
IDFYFDENPYFENK

SEQ ID NO: 5139 - protein, 21 aa, Homo Sapien
IDNSQVESGSLEDDWDFLPPK

SEQ ID NO: 5140 - protein, 22 aa, Homo Sapien
IDNSQVESGSLEDDWDFLPPKK

SEQ ID NO: 5141 - protein, 15 aa, Homo Sapien
IDQYQGADAVGLEEK

SEQ ID NO: 5142 - protein, 13 aa, Homo Sapien
IDSGSEVIVGVNK

SEQ ID NO: 5143 - protein, 9 aa, Homo Sapien
IEANEALVK

SEQ ID NO: 5144 - protein, 11 aa, Homo Sapien
IEAQNQPFDAK

SEQ ID NO: 5145 - protein, 15 aa, Homo Sapien
IEDLSQQAQLAAAEK

SEQ ID NO: 5146 - protein, 20 aa, Homo Sapien
IEDMAMLTHLNEPAVLYNLK

SEQ ID NO: 5147 - protein, 8 aa, Homo Sapien
IEEELGSK

SEQ ID NO: 5148 - protein, 11 aa, Homo Sapien
IEELQLIVNDK

SEQ ID NO: 5149 - protein, 12 aa, Homo Sapien
IEGDPQGVQQAK

SEQ ID NO: 5150 - protein, 10 aa, Homo Sapien
IEGLLAAFPK

SEQ ID NO: 5151 - protein, 15 aa, Homo Sapien
IEINFPAEYPFKPPK

SEQ ID NO: 5152 - protein, 14 aa, Homo Sapien
IEPHTGLLLLSVQK

SEQ ID NO: 5153 - protein, 13 aa, Homo Sapien
IEQFVYSSPHDNK

SEQ ID NO: 5154 - protein, 14 aa, Homo Sapien
IEQLSPFPFDLLLK

SEQ ID NO: 5155 - protein, 13 aa, Homo Sapien
IESLSSQLSNLQK

SEQ ID NO: 5156 - protein, 12 aa, Homo Sapien
IETNENNLESAK

SEQ ID NO: 5157 - protein, 11 aa, Homo Sapien
IEVEKPFAIAK

SEQ ID NO: 5158 - protein, 14 aa, Homo Sapien
IEVLQQHENEDIYK

SEQ ID NO: 5159 - protein, 11 aa, Homo Sapien
IEWHLNAFSTK

SEQ ID NO: 5160 - protein, 18 aa, Homo Sapien
IEWLESHQDADIEDFKAK

SEQ ID NO: 5161 - protein, 16 aa, Homo Sapien
IFGGEIKTHILLFLPK

SEQ ID NO: 5162 - protein, 15 aa, Homo Sapien
IFQNLDGALDEVVLK

SEQ ID NO: 5163 - protein, 13 aa, Homo Sapien
IFSGSSHQDLSQK

SEQ ID NO: 5164 - protein, 17 aa, Homo Sapien
IGDVVGSSGANQQTSGK

SEQ ID NO: 5165 - protein, 27 aa, Homo Sapien
IGEEQSAEDAEDGPPELLFIHGGHTAK

SEQ ID NO: 5166 - protein, 27 aa, Homo Sapien
IGEEQSPEDAEDGPPELLFIHGGHTAK

SEQ ID NO: 5167 - protein, 11 aa, Homo Sapien
IGEHMEEHGIK

SEQ ID NO: 5168 - protein, 9 aa, Homo Sapien
IGFGSFVEK

SEQ ID NO: 5169 - protein, 20 aa, Homo Sapien
IGGDAGTSLNSNDYGYGGQK

SEQ ID NO: 5170 - protein, 9 aa, Homo Sapien
IGILITDGK

SEQ ID NO: 5171 - protein, 15 aa, Homo Sapien
IGNTGGMLDNILASK

SEQ ID NO: 5172 - protein, 18 aa, Homo Sapien
IGPIATPDYIQNAPGLPK

SEQ ID NO: 5173 - protein, 18 aa, Homo Sapien
IGPYQPNVPVGIDYVIPK

SEQ ID NO: 5174 - protein, 18 aa, Homo Sapien
IGQQPQQPGAPPQQDYTK

SEQ ID NO: 5175 - protein, 15 aa, Homo Sapien
IGYSSPQTLADQSSK

SEQ ID NO: 5176 - protein, 8 aa, Homo Sapien
IHAGPITK

SEQ ID NO: 5177 - protein, 12 aa, Homo Sapien
IHVLEAQDLIAK

SEQ ID NO: 5178 - protein, 23 aa, Homo Sapien
IHVMPDTPDILQAKQNQTLYSQK

SEQ ID NO: 5179 - protein, 11 aa, Homo Sapien
IIADIFEYTAK

SEQ ID NO: 5180 - protein, 16 aa, Homo Sapien
IIAEGANGPTTPEADK

SEQ ID NO: 5181 - protein, 9 aa, Homo Sapien
IIALDGDTK

SEQ ID NO: 5182 - protein, 12 aa, Homo Sapien
IIDGVPVEITEK

SEQ ID NO: 5183 - protein, 7 aa, Homo Sapien
IIGAVAK

SEQ ID NO: 5184 - protein, 20 aa, Homo Sapien
IIGLDQVAGMSETALPGAFK

SEQ ID NO: 5185 - protein, 12 aa, Homo Sapien
IIIPPFLAYGEK

SEQ ID NO: 5186 - protein, 10 aa, Homo Sapien
IINADSEDPK

SEQ ID NO: 5187 - protein, 23 aa, Homo Sapien
IITITGTQDQIQNAQYLLQNSVK

SEQ ID NO: 5188 - protein, 13 aa, Homo Sapien
IITLAGPTNAIFK

SEQ ID NO: 5189 - protein, 13 aa, Homo Sapien
IITLTGPTNAIFK

SEQ ID NO: 5190 - protein, 16 aa, Homo Sapien
IIVDELKQEVISTSSK

SEQ ID NO: 5191 - protein, 20 aa, Homo Sapien
IIVDTYGGWGAHGGGAFSGK

SEQ ID NO: 5192 - protein, 12 aa, Homo Sapien
IIYIVHDEVKDK

SEQ ID NO: 5193 - protein, 9 aa, Homo Sapien
IKPVLMMNK

SEQ ID NO: 5194 - protein, 9 aa, Homo Sapien
ILAEGGGAK

SEQ ID NO: 5195 - protein, 18 aa, Homo Sapien
ILAIGLINEALDEGDAQK

SEQ ID NO: 5196 - protein, 14 aa, Homo Sapien
ILAQATSDLVNAIK

SEQ ID NO: 5197 - protein, 14 aa, Homo Sapien
ILDDPSPPQPGEEK

SEQ ID NO: 5198 - protein, 9 aa, Homo Sapien
ILDQSEAEK

SEQ ID NO: 5199 - protein, 9 aa, Homo Sapien
ILEAHVEAK

SEQ ID NO: 5200 - protein, 9 aa, Homo Sapien
ILEAVPQVK

SEQ ID NO: 5201 - protein, 14 aa, Homo Sapien
ILFAEAHIPGSPFK

SEQ ID NO: 5202 - protein, 7 aa, Homo Sapien
ILGAVAK

SEQ ID NO: 5203 - protein, 8 aa, Homo Sapien
ILGPGLNK

SEQ ID NO: 5204 - protein, 9 aa, Homo Sapien
ILGPLSYSK

SEQ ID NO: 5205 - protein, 10 aa, Homo Sapien
ILGPQGNTIK

SEQ ID NO: 5206 - protein, 11 aa, Homo Sapien
ILHLLGQEGPK

SEQ ID NO: 5207 - protein, 11 aa, Homo Sapien
ILIIGESGVGK

SEQ ID NO: 5208 - protein, 12 aa, Homo Sapien
ILKLPSFELLHK

SEQ ID NO: 5209 - protein, 15 aa, Homo Sapien
ILPEQGLMLTGSADK

SEQ ID NO: 5210 - protein, 10 aa, Homo Sapien
ILPVGASSFK

SEQ ID NO: 5211 - protein, 12 aa, Homo Sapien
ILQDGGLQVVEK

SEQ ID NO: 5212 - protein, 7 aa, Homo Sapien
ILQVSFK

SEQ ID NO: 5213 - protein, 10 aa, Homo Sapien
ILSDPSDDTK

SEQ ID NO: 5214 - protein, 17 aa, Homo Sapien
ILSISADIETIGEILKK

SEQ ID NO: 5215 - protein, 15 aa, Homo Sapien
ILTGGADKNVVVFDK

SEQ ID NO: 5216 - protein, 12 aa, Homo Sapien
ILTLESMNPQVK

SEQ ID NO: 5217 - protein, 12 aa, Homo Sapien
ILYLTPEQEKDK

SEQ ID NO: 5218 - protein, 16 aa, Homo Sapien
ILYMTDEVNDPSLTIK

SEQ ID NO: 5219 - protein, 17 aa, Homo Sapien
IMLFTNEDNPHGNDSAK

SEQ ID NO: 5220 - protein, 16 aa, Homo Sapien
IMLNTPEDVQALVSGK

SEQ ID NO: 5221 - protein, 21 aa, Homo Sapien
IMNGEADAMSLDGGFVYIAGK

SEQ ID NO: 5222 - protein, 17 aa, Homo Sapien
INAWNSPTLPIYEPGLK

SEQ ID NO: 5223 - protein, 10 aa, Homo Sapien
INEILSNALK

SEQ ID NO: 5224 - protein, 23 aa, Homo Sapien
INKLMNESLMLVTALNPHIGYDK

SEQ ID NO: 5225 - protein, 12 aa, Homo Sapien
INVYYNEAAGNK

SEQ ID NO: 5226 - protein, 12 aa, Homo Sapien
INVYYNEATGNK

SEQ ID NO: 5227 - protein, 11 aa, Homo Sapien
IPDMAPPQQAK

SEQ ID NO: 5228 - protein, 11 aa, Homo Sapien
IPDQLVILDMK

SEQ ID NO: 5229 - protein, 19 aa, Homo Sapien
IPEISIQDMTAQVTSPSGK

SEQ ID NO: 5230 - protein, 13 aa, Homo Sapien
IPLLSDLTHQISK

SEQ ID NO: 5231 - protein, 13 aa, Homo Sapien
IPSGAFEDLENLK

SEQ ID NO: 5232 - protein, 14 aa, Homo Sapien
IPVDTYNNILTVLK

SEQ ID NO: 5233 - protein, 17 aa, Homo Sapien
IPYLPITNFNQNWQDGK

SEQ ID NO: 5234 - protein, 17 aa, Homo Sapien
IQAGEGETAVLNQLQEK

SEQ ID NO: 5235 - protein, 16 aa, Homo Sapien
IQEGVFDINNEANGIK

SEQ ID NO: 5236 - protein, 27 aa, Homo Sapien
IQENALPMMLAEPPQNLIAQSQSGTGK

SEQ ID NO: 5237 - protein, 10 aa, Homo Sapien
IQNLEALLQK

SEQ ID NO: 5238 - protein, 9 aa, Homo Sapien
IQQIAEGEK

SEQ ID NO: 5239 - protein, 8 aa, Homo Sapien
IQQIIEGK

SEQ ID NO: 5240 - protein, 8 aa, Homo Sapien
ISALALLK

SEQ ID NO: 5241 - protein, 14 aa, Homo Sapien
ISAPNVDFNLEGPK

SEQ ID NO: 5242 - protein, 7 aa, Homo Sapien
ISEENIK

SEQ ID NO: 5243 - protein, 11 aa, Homo Sapien
ISFFNKVSGLK

SEQ ID NO: 5244 - protein, 9 aa, Homo Sapien
ISLADIAQK

SEQ ID NO: 5245 - protein, 11 aa, Homo Sapien
ISLNTLTLNVK

SEQ ID NO: 5246 - protein, 11 aa, Homo Sapien
ISMPDFDLHLK

SEQ ID NO: 5247 - protein, 14 aa, Homo Sapien
ISMPDIDLNLTGPK

SEQ ID NO: 5248 - protein, 14 aa, Homo Sapien
ISMPDVDFNLKGPK

SEQ ID NO: 5249 - protein, 11 aa, Homo Sapien
ISMPEIDLNLK

SEQ ID NO: 5250 - protein, 14 aa, Homo Sapien
ISMPEIDLNLKGSK

SEQ ID NO: 5251 - protein, 11 aa, Homo Sapien
ISMPEVDLNLK

SEQ ID NO: 5252 - protein, 14 aa, Homo Sapien
ISMPEVDLNLKGPK

SEQ ID NO: 5253 - protein, 14 aa, Homo Sapien
ISMSEVDLNVAAPK

SEQ ID NO: 5254 - protein, 12 aa, Homo Sapien
ISSDLDGHPVPK

SEQ ID NO: 5255 - protein, 13 aa, Homo Sapien
ISSLLEEQFQQGK

SEQ ID NO: 5256 - protein, 18 aa, Homo Sapien
ISVGSDSDLVIWDPDAVK

SEQ ID NO: 5257 - protein, 10 aa, Homo Sapien
ITALDEFATK

SEQ ID NO: 5258 - protein, 8 aa, Homo Sapien
ITASEALK

SEQ ID NO: 5259 - protein, 11 aa, Homo Sapien
ITDDMDQVELK

SEQ ID NO: 5260 - protein, 8 aa, Homo Sapien
ITDEEATK

SEQ ID NO: 5261 - protein, 17 aa, Homo Sapien
ITDSAGHILYSKEDATK

SEQ ID NO: 5262 - protein, 10 aa, Homo Sapien
ITEIKDGDFK

SEQ ID NO: 5263 - protein, 14 aa, Homo Sapien
ITENDIQIALDDAK

SEQ ID NO: 5264 - protein, 10 aa, Homo Sapien
ITIGQAPTEK

SEQ ID NO: 5265 - protein, 12 aa, Homo Sapien
ITLPVDFVTADK

SEQ ID NO: 5266 - protein, 11 aa, Homo Sapien
ITLQDVVSHSK

SEQ ID NO: 5267 - protein, 11 aa, Homo Sapien
ITLYDYDLLSK

SEQ ID NO: 5268 - protein, 14 aa, Homo Sapien
ITLYDYDLLSKDEK

SEQ ID NO: 5269 - protein, 30 aa, Homo Sapien
ITNAGMVSDEELEQMLDSGQSEVFVSNILK

SEQ ID NO: 5270 - protein, 23 aa, Homo Sapien
ITSGPFEPDLYKSEMEVQDAELK

SEQ ID NO: 5271 - protein, 21 aa, Homo Sapien
ITYGETGGNSPVQEFTVPGSK

SEQ ID NO: 5272 - protein, 26 aa, Homo Sapien
IVAPELYIAVGISGAIQHLAGMKDSK

SEQ ID NO: 5273 - protein, 15 aa, Homo Sapien
IVAQVWPFLGQYMEK

SEQ ID NO: 5274 - protein, 26 aa, Homo Sapien
IVEAAENEYQTAISENYQTMSDTTFK

SEQ ID NO: 5275 - protein, 17 aa, Homo Sapien
IVEGLMTTVHAITATQK

SEQ ID NO: 5276 - protein, 11 aa, Homo Sapien
IVEIPFNSTNK

SEQ ID NO: 5277 - protein, 20 aa, Homo Sapien
IVFDSIDNLEAAPHDIGYVK

SEQ ID NO: 5278 - protein, 9 aa, Homo Sapien
IVFSPEEAK

SEQ ID NO: 5279 - protein, 14 aa, Homo Sapien
IVIGYQSHADTATK

SEQ ID NO: 5280 - protein, 7 aa, Homo Sapien
IVTNNLK

SEQ ID NO: 5281 - protein, 10 aa, Homo Sapien
IVVFQYSDGK

SEQ ID NO: 5282 - protein, 17 aa, Homo Sapien
IVVFQYSDGKLQTVAEK

SEQ ID NO: 5283 - protein, 25 aa, Homo Sapien
IVYNNADGTEINEVEVDPITTFPLK

SEQ ID NO: 5284 - protein, 14 aa, Homo Sapien
IYEFPETDDEEENK

SEQ ID NO: 5285 - protein, 17 aa, Homo Sapien
IYEFPETDDEEENKLVK

SEQ ID NO: 5286 - protein, 16 aa, Homo Sapien
IYGADDIELLPEAQHK

SEQ ID NO: 5287 - protein, 10 aa, Homo Sapien
IYGISFPDPK

SEQ ID NO: 5288 - protein, 10 aa, Homo Sapien
IYLDMLNVYK

SEQ ID NO: 5289 - protein, 14 aa, Homo Sapien
KAAQNSGEAEYIEK

SEQ ID NO: 5290 - protein, 13 aa, Homo Sapien
KAIIIFVPVPQLK

SEQ ID NO: 5291 - protein, 12 aa, Homo Sapien
KALAAAGYDVEK

SEQ ID NO: 5292 - protein, 13 aa, Homo Sapien
KASGPPVSELITK

SEQ ID NO: 5293 - protein, 13 aa, Homo Sapien
KATGPPVSELITK

SEQ ID NO: 5294 - protein, 11 aa, Homo Sapien
KATVNLLGEEK

SEQ ID NO: 5295 - protein, 12 aa, Homo Sapien
KAVDEAADALLK

SEQ ID NO: 5296 - protein, 14 aa, Homo Sapien
KDDEENYLDLFSHK

SEQ ID NO: 5297 - protein, 17 aa, Homo Sapien
KDDPVTNLNNAFEVAEK

SEQ ID NO: 5298 - protein, 10 aa, Homo Sapien
KDEQEHEFYK

SEQ ID NO: 5299 - protein, 11 aa, Homo Sapien
KDGFNITTSEK

SEQ ID NO: 5300 - protein, 12 aa, Homo Sapien
KEAAENSLVAYK

SEQ ID NO: 5301 - protein, 11 aa, Homo Sapien
KEETQPPVALK

SEQ ID NO: 5302 - protein, 11 aa, Homo Sapien
KEIHTVPDMGK

SEQ ID NO: 5303 - protein, 20 aa, Homo Sapien
KELLELEALSMAVESTGTAK

SEQ ID NO: 5304 - protein, 7 aa, Homo Sapien
KEVADFK

SEQ ID NO: 5305 - protein, 8 aa, Homo Sapien
KEVQVIEK

SEQ ID NO: 5306 - protein, 6 aa, Homo Sapien
KEWYEK

SEQ ID NO: 5307 - protein, 8 aa, Homo Sapien
KEYTIVVK

SEQ ID NO: 5308 - protein, 7 aa, Homo Sapien
KFDDFQK

SEQ ID NO: 5309 - protein, 10 aa, Homo Sapien
KFDQLLAEEK

SEQ ID NO: 5310 - protein, 15 aa, Homo Sapien
KFGYVDFESAEDLEK

SEQ ID NO: 5311 - protein, 16 aa, Homo Sapien
KFNALFAQGNYSEAAK

SEQ ID NO: 5312 - protein, 16 aa, Homo Sapien
KFSAMHEFQNLHAQSK

SEQ ID NO: 5313 - protein, 17 aa, Homo Sapien
KFYPLEIDYGQDEEAVK

SEQ ID NO: 5314 - protein, 19 aa, Homo Sapien
KGADFLVTEVENGGSLGSK

SEQ ID NO: 5315 - protein, 13 aa, Homo Sapien
KGDILTLLNSTNK

SEQ ID NO: 5316 - protein, 10 aa, Homo Sapien
KGEFETGFEK

SEQ ID NO: 5317 - protein, 8 aa, Homo Sapien
KGEIFELK

SEQ ID NO: 5318 - protein, 27 aa, Homo Sapien
KGNFYIFDVLDQDGNIVSPSEIQAHLK

SEQ ID NO: 5319 - protein, 26 aa, Homo Sapien
KGSITSVQAIYVPADDLTDPAPATTF

SEQ ID NO: 5320 - protein, 21 aa, Homo Sapien
KHQILEQAVEDYAETVHQLSK

SEQ ID NO: 5321 - protein, 12 aa, Homo Sapien
KHSMLFIEASAK

SEQ ID NO: 5322 - protein, 8 aa, Homo Sapien
KIDLEAEK

SEQ ID NO: 5323 - protein, 18 aa, Homo Sapien
KIEDLGAAMEEALILDNK

SEQ ID NO: 5324 - protein, 16 aa, Homo Sapien
KIEFEQFLPMMQAISN

SEQ ID NO: 5325 - protein, 22 aa, Homo Sapien
KIEIGDGAELTAEFLYDEVHPK

SEQ ID NO: 5326 - protein, 10 aa, Homo Sapien
KIGVLITDGK

SEQ ID NO: 5327 - protein, 10 aa, Homo Sapien
KIVFVTGNAK

SEQ ID NO: 5328 - protein, 10 aa, Homo Sapien
KLALDTSFLK

SEQ ID NO: 5329 - protein, 24 aa, Homo Sapien
KLEGDSTDLSDQIAELQAQIAELK

SEQ ID NO: 5330 - protein, 7 aa, Homo Sapien
KLEMDLK

SEQ ID NO: 5331 - protein, 8 aa, Homo Sapien
KLLASLVK

SEQ ID NO: 5332 - protein, 9 aa, Homo Sapien
KLLEATELK

SEQ ID NO: 5333 - protein, 7 aa, Homo Sapien
KLNDLVK

SEQ ID NO: 5334 - protein, 16 aa, Homo Sapien
KLPGPAVNLSEIQNIK

SEQ ID NO: 5335 - protein, 16 aa, Homo Sapien
KLVESELLEILTVVGK

SEQ ID NO: 5336 - protein, 13 aa, Homo Sapien
KMQELLQTQDFSK

SEQ ID NO: 5337 - protein, 12 aa, Homo Sapien
KNFATSLYSMIK

SEQ ID NO: 5338 - protein, 24 aa, Homo Sapien
KPEDWDEEMDGEWEPPVIQNPEYK

SEQ ID NO: 5339 - protein, 12 aa, Homo Sapien
KPEHELFLVYGK

SEQ ID NO: 5340 - protein, 9 aa, Homo Sapien
KPFPDFVYK

SEQ ID NO: 5341 - protein, 26 aa, Homo Sapien
KPLPDHVSIVEPKDEILPTTPISEQK

SEQ ID NO: 5342 - protein, 8 aa, Homo Sapien
KPPPNLFK

SEQ ID NO: 5343 - protein, 19 aa, Homo Sapien
KPQYMVLVPSLLHTETTEK

SEQ ID NO: 5344 - protein, 10 aa, Homo Sapien
KQLADETLLK

SEQ ID NO: 5345 - protein, 10 aa, Homo Sapien
KQLDTLGNDK

SEQ ID NO: 5346 - protein, 13 aa, Homo Sapien
KQPALDVLYDVMK

SEQ ID NO: 5347 - protein, 11 aa, Homo Sapien
KSADTLWDIQK

SEQ ID NO: 5348 - protein, 11 aa, Homo Sapien
KSDGIYIINLK

SEQ ID NO: 5349 - protein, 12 aa, Homo Sapien
KSEIEYYAMLAK

SEQ ID NO: 5350 - protein, 18 aa, Homo Sapien
KSQIFSTASDNQPTVTIK

SEQ ID NO: 5351 - protein, 16 aa, Homo Sapien
KTKPYIQVDIGGGQTK

SEQ ID NO: 5352 - protein, 11 aa, Homo Sapien
KVDEAIALFQK

SEQ ID NO: 5353 - protein, 12 aa, Homo Sapien
KVEAQLQELQVK

SEQ ID NO: 5354 - protein, 7 aa, Homo Sapien
KVEDMMK

SEQ ID NO: 5355 - protein, 9 aa, Homo Sapien
KVHVIFNYK

SEQ ID NO: 5356 - protein, 25 aa, Homo Sapien
KVIHDNFGIVEGLMTTVHAITATQK

SEQ ID NO: 5357 - protein, 12 aa, Homo Sapien
KVVGDVAYDEAK

SEQ ID NO: 5358 - protein, 12 aa, Homo Sapien
KVVVEQLNLLVK

SEQ ID NO: 5359 - protein, 16 aa, Homo Sapien
KYEQGFITDPVVLSPK

SEQ ID NO: 5360 - protein, 7 aa, Homo Sapien
KYIPGTK

SEQ ID NO: 5361 - protein, 10 aa, Homo Sapien
KYLHPSSYTK

SEQ ID NO: 5362 - protein, 9 aa, Homo Sapien
KYLLQEQLK

SEQ ID NO: 5363 - protein, 8 aa, Homo Sapien
KYTFESDK

SEQ ID NO: 5364 - protein, 14 aa, Homo Sapien
LAAAAEIDEEPVSK

SEQ ID NO: 5365 - protein, 10 aa, Homo Sapien
LAALSIEEGK

SEQ ID NO: 5366 - protein, 9 aa, Homo Sapien
LAASVPYVK

SEQ ID NO: 5367 - protein, 23 aa, Homo Sapien
LADVDKDGLLDDEEFALANHLIK

SEQ ID NO: 5368 - protein, 14 aa, Homo Sapien
LAEFSSQAAEEEEK

SEQ ID NO: 5369 - protein, 12 aa, Homo Sapien
LAEISDVWEEMK

SEQ ID NO: 5370 - protein, 11 aa, Homo Sapien
LAETVFNFQEK

SEQ ID NO: 5371 - protein, 10 aa, Homo Sapien
LAEVALAYAK

SEQ ID NO: 5372 - protein, 12 aa, Homo Sapien
LAILGIHNEVSK

SEQ ID NO: 5373 - protein, 11 aa, Homo Sapien
LALPADSVNIK

SEQ ID NO: 5374 - protein, 15 aa, Homo Sapien
LALQAQPVPDELVTK

SEQ ID NO: 5375 - protein, 20 aa, Homo Sapien
LALVTGGEIASTFDHPELVK

SEQ ID NO: 5376 - protein, 14 aa, Homo Sapien
LAMAIPDKWIQLLK

SEQ ID NO: 5377 - protein, 14 aa, Homo Sapien
LAPALATGNTVVMK

SEQ ID NO: 5378 - protein, 13 aa, Homo Sapien
LAPDYDALDVANK

SEQ ID NO: 5379 - protein, 20 aa, Homo Sapien
LAQAAQSSAATITQLAEVVK

SEQ ID NO: 5380 - protein, 11 aa, Homo Sapien
LAQGEYIAPEK

SEQ ID NO: 5381 - protein, 33 aa, Homo Sapien
LASVPAGGAVAVSAAPGSAAPAAGSAPAAAEEK

SEQ ID NO: 5382 - protein, 7 aa, Homo Sapien
LASYLEK

SEQ ID NO: 5383 - protein, 14 aa, Homo Sapien
LAVMSVDLGSESMK

SEQ ID NO: 5384 - protein, 28 aa, Homo Sapien
LAVNNIAGIEEVNMIKDDGTVIHFNNPK

SEQ ID NO: 5385 - protein, 7 aa, Homo Sapien
LAVYIDK

SEQ ID NO: 5386 - protein, 10 aa, Homo Sapien
LDASEEAIKK

SEQ ID NO: 5387 - protein, 9 aa, Homo Sapien
LDDLVSTGK

SEQ ID NO: 5388 - protein, 12 aa, Homo Sapien
LDELQASDVSVK

SEQ ID NO: 5389 - protein, 13 aa, Homo Sapien
LDIISEDISELQK

SEQ ID NO: 5390 - protein, 7 aa, Homo Sapien
LDKLDVK

SEQ ID NO: 5391 - protein, 15 aa, Homo Sapien
LDLDLTADSQPPVFK

SEQ ID NO: 5392 - protein, 10 aa, Homo Sapien
LDPEGKGTIK

SEQ ID NO: 5393 - protein, 11 aa, Homo Sapien
LDPSIFESLQK

SEQ ID NO: 5394 - protein, 9 aa, Homo Sapien
LDPTGTFEK

SEQ ID NO: 5395 - protein, 16 aa, Homo Sapien
LDQEVAEVDKNIELLK

SEQ ID NO: 5396 - protein, 9 aa, Homo Sapien
LEAALGEAK

SEQ ID NO: 5397 - protein, 10 aa, Homo Sapien
LEAALGEAKK

SEQ ID NO: 5398 - protein, 8 aa, Homo Sapien
LEAHVEAK

SEQ ID NO: 5399 - protein, 7 aa, Homo Sapien
LEDLIVK

SEQ ID NO: 5400 - protein, 14 aa, Homo Sapien
LEDSSNQVTQAVAK

SEQ ID NO: 5401 - protein, 10 aa, Homo Sapien
LEELHVIDVK

SEQ ID NO: 5402 - protein, 10 aa, Homo Sapien
LEGNPIVLGK

SEQ ID NO: 5403 - protein, 13 aa, Homo Sapien
LEHLYLNNNSIEK

SEQ ID NO: 5404 - protein, 15 aa, Homo Sapien
LEIDDLSSSMESVSK

SEQ ID NO: 5405 - protein, 20 aa, Homo Sapien
LEIQSQVDSQHVGHSVLTAK

SEQ ID NO: 5406 - protein, 16 aa, Homo Sapien
LEQQVEDLESSLEQEK

SEQ ID NO: 5407 - protein, 17 aa, Homo Sapien
LEQQVEDLESSLEQEKK

SEQ ID NO: 5408 - protein, 13 aa, Homo Sapien
LFIGGLNTETNEK

SEQ ID NO: 5409 - protein, 16 aa, Homo Sapien
LFLFHTSLPIAEAPGK

SEQ ID NO: 5410 - protein, 12 aa, Homo Sapien
LFLVDDLVDSLK

SEQ ID NO: 5411 - protein, 12 aa, Homo Sapien
LFQVEYAIEAIK

SEQ ID NO: 5412 - protein, 11 aa, Homo Sapien
LFVLFGAEILK

SEQ ID NO: 5413 - protein, 16 aa, Homo Sapien
LFYLALPPTVYEAVTK

SEQ ID NO: 5414 - protein, 22 aa, Homo Sapien
LGAASLGAEDPETQVVLINAVK

SEQ ID NO: 5415 - protein, 15 aa, Homo Sapien
LGAVYDVSHYNALLK

SEQ ID NO: 5416 - protein, 12 aa, Homo Sapien
LGDTALHAAAWK

SEQ ID NO: 5417 - protein, 13 aa, Homo Sapien
LGFDEEGSLYILK

SEQ ID NO: 5418 - protein, 9 aa, Homo Sapien
LGFGSFVEK

SEQ ID NO: 5419 - protein, 34 aa, Homo Sapien
LGGGMPGLGQGPPTDAPAVDTAEQVYISSLALLK

SEQ ID NO: 5420 - protein, 10 aa, Homo Sapien
LGGIGQFLAK

SEQ ID NO: 5421 - protein, 14 aa, Homo Sapien
LGGSAVISLEGKPL

SEQ ID NO: 5422 - protein, 18 aa, Homo Sapien
LGGSLADSYLDEGFLLDK

SEQ ID NO: 5423 - protein, 16 aa, Homo Sapien
LGHAETDEQLQNIISK

SEQ ID NO: 5424 - protein, 13 aa, Homo Sapien
LGIAPQIQDLLGK

SEQ ID NO: 5425 - protein, 24 aa, Homo Sapien
LGKDPNTYFIVGTAMVYPEEAEPK

SEQ ID NO: 5426 - protein, 12 aa, Homo Sapien
LGLKEFYILWTK

SEQ ID NO: 5427 - protein, 13 aa, Homo Sapien
LGNQEPGGQTALK

SEQ ID NO: 5428 - protein, 17 aa, Homo Sapien
LGPHTVLTFIFLEQMNK

SEQ ID NO: 5429 - protein, 8 aa, Homo Sapien
LGPNDQYK

SEQ ID NO: 5430 - protein, 19 aa, Homo Sapien
LGQMLSIQDDAFINPHLAK

SEQ ID NO: 5431 - protein, 12 aa, Homo Sapien
LGSIDIDHTQYK

SEQ ID NO: 5432 - protein, 13 aa, Homo Sapien
LGSTVFVANLDYK

SEQ ID NO: 5433 - protein, 12 aa, Homo Sapien
LGTLSALDILIK

SEQ ID NO: 5434 - protein, 19 aa, Homo Sapien
LHISPSNMTNQNTPEYMEK

SEQ ID NO: 5435 - protein, 7 aa, Homo Sapien
LHVETVK

SEQ ID NO: 5436 - protein, 12 aa, Homo Sapien
LIALLEVLSQKK

SEQ ID NO: 5437 - protein, 9 aa, Homo Sapien
LIDFLESGK

SEQ ID NO: 5438 - protein, 12 aa, Homo Sapien
LIDLHSPSEIVK

SEQ ID NO: 5439 - protein, 14 aa, Homo Sapien
LIELNYLGTVSLTK

SEQ ID NO: 5440 - protein, 8 aa, Homo Sapien
LIINSLYK

SEQ ID NO: 5441 - protein, 18 aa, Homo Sapien
LIKEELQSQVELLNSFEK

SEQ ID NO: 5442 - protein, 8 aa, Homo Sapien
LILEQMQK

SEQ ID NO: 5443 - protein, 18 aa, Homo Sapien
LILEQMQKDPQALSEHLK

SEQ ID NO: 5444 - protein, 12 aa, Homo Sapien
LIPDSIGKDIEK

SEQ ID NO: 5445 - protein, 13 aa, Homo Sapien
LIQEQHPEEELIK

SEQ ID NO: 5446 - protein, 13 aa, Homo Sapien
LISQAYEVLSDPK

SEQ ID NO: 5447 - protein, 14 aa, Homo Sapien
LKDEGVELFAIGIK

SEQ ID NO: 5448 - protein, 23 aa, Homo Sapien
LKDLNSQADSLMTSSAFDTSQVK

SEQ ID NO: 5449 - protein, 16 aa, Homo Sapien
LKGEATVSFDDPPSAK

SEQ ID NO: 5450 - protein, 19 aa, Homo Sapien
LKGEMMDLQHGSLFLQTPK

SEQ ID NO: 5451 - protein, 18 aa, Homo Sapien
LKGPQITGPSLEGDLGLK

SEQ ID NO: 5452 - protein, 9 aa, Homo Sapien
LKQIEEQTK

SEQ ID NO: 5453 - protein, 9 aa, Homo Sapien
LKTQLPQQK

SEQ ID NO: 5454 - protein, 11 aa, Homo Sapien
LKVPEWVDTVK

SEQ ID NO: 5455 - protein, 11 aa, Homo Sapien
LLADPTGAFGK

SEQ ID NO: 5456 - protein, 18 aa, Homo Sapien
LLAHLYATFATADADSGK

SEQ ID NO: 5457 - protein, 13 aa, Homo Sapien
LLALNPDAVELFK

SEQ ID NO: 5458 - protein, 16 aa, Homo Sapien
LLALSHEHKFPTVPVK

SEQ ID NO: 5459 - protein, 22 aa, Homo Sapien
LLDFGSLSNLQVTQPTVGMNFK

SEQ ID NO: 5460 - protein, 15 aa, Homo Sapien
LLDPEDISVDHPDEK

SEQ ID NO: 5461 - protein, 18 aa, Homo Sapien
LLEPLVTQVTTLVNTNSK

SEQ ID NO: 5462 - protein, 10 aa, Homo Sapien
LLEQYKEESK

SEQ ID NO: 5463 - protein, 10 aa, Homo Sapien
LLEVEHPAAK

SEQ ID NO: 5464 - protein, 15 aa, Homo Sapien
LLHDQVGVIQFGPYK

SEQ ID NO: 5465 - protein, 14 aa, Homo Sapien
LLHEVQELTTEVEK

SEQ ID NO: 5466 - protein, 10 aa, Homo Sapien
LLHSENYVTK

SEQ ID NO: 5467 - protein, 12 aa, Homo Sapien
LLILADMADVYK

SEQ ID NO: 5468 - protein, 18 aa, Homo Sapien
LLIYAVLPTGDVIGDSAK

SEQ ID NO: 5469 - protein, 9 aa, Homo Sapien
LLLEGVENK

SEQ ID NO: 5470 - protein, 13 aa, Homo Sapien
LLLQGLMDSVEAK

SEQ ID NO: 5471 - protein, 18 aa, Homo Sapien
LLLQQVSLPELPGEYSMK

SEQ ID NO: 5472 - protein, 7 aa, Homo Sapien
LLMDDLK

SEQ ID NO: 5473 - protein, 18 aa, Homo Sapien
LLSEEVFDFSSGQITQVK

SEQ ID NO: 5474 - protein, 10 aa, Homo Sapien
LLSNDEVTIK

SEQ ID NO: 5475 - protein, 10 aa, Homo Sapien
LLSTDPVTAK

SEQ ID NO: 5476 - protein, 12 aa, Homo Sapien
LLTDDGNKWLYK

SEQ ID NO: 5477 - protein, 21 aa, Homo Sapien
LLTQHENIKNEIDNYEEDYQK

SEQ ID NO: 5478 - protein, 10 aa, Homo Sapien
LLVSASQDGK

SEQ ID NO: 5479 - protein, 12 aa, Homo Sapien
LLVSGAASTPDK

SEQ ID NO: 5480 - protein, 12 aa, Homo Sapien
LMEADIAIQGDK

SEQ ID NO: 5481 - protein, 20 aa, Homo Sapien
LMNESLMLVTALNPHIGYDK

SEQ ID NO: 5482 - protein, 16 aa, Homo Sapien
LMNETTAVALAYGIYK

SEQ ID NO: 5483 - protein, 7 aa, Homo Sapien
LMSLLEK

SEQ ID NO: 5484 - protein, 13 aa, Homo Sapien
LMTTVHAITATQK

SEQ ID NO: 5485 - protein, 10 aa, Homo Sapien
LMWIPVYGGK

SEQ ID NO: 5486 - protein, 10 aa, Homo Sapien
LNDYIFSFDK

SEQ ID NO: 5487 - protein, 17 aa, Homo Sapien
LNEAKEEFTSGGPLGQK

SEQ ID NO: 5488 - protein, 7 aa, Homo Sapien
LNFLEIK

SEQ ID NO: 5489 - protein, 13 aa, Homo Sapien
LNFLEIKVEYVPK

SEQ ID NO: 5490 - protein, 7 aa, Homo Sapien
LNHENLK

SEQ ID NO: 5491 - protein, 8 aa, Homo Sapien
LNHYVLYK

SEQ ID NO: 5492 - protein, 13 aa, Homo Sapien
LNIIIVAEGAIDK

SEQ ID NO: 5493 - protein, 24 aa, Homo Sapien
LNIIIVAEGAIDKNGKPITSEDIK

SEQ ID NO: 5494 - protein, 9 aa, Homo Sapien
LNILDTLSK

SEQ ID NO: 5495 - protein, 18 aa, Homo Sapien
LNLEAINYMAADGDFKIK

SEQ ID NO: 5496 - protein, 14 aa, Homo Sapien
LNLEHIATSSAVSK

SEQ ID NO: 5497 - protein, 20 aa, Homo Sapien
LNLLDLDYELAEQLDNIAEK

SEQ ID NO: 5498 - protein, 11 aa, Homo Sapien
LNQLKPGLQYK

SEQ ID NO: 5499 - protein, 23 aa, Homo Sapien
LNSNTQVVLLSATMPSDVLEVTK

SEQ ID NO: 5500 - protein, 15 aa, Homo Sapien
LPAAGVGDMVMATVK

SEQ ID NO: 5501 - protein, 11 aa, Homo Sapien
LPDVYGVFQFK

SEQ ID NO: 5502 - protein, 20 aa, Homo Sapien
LPGAAVDLPAVSEKDIQDLK

SEQ ID NO: 5503 - protein, 39 aa, Homo Sapien
LPGISETAMIFAGVDVTKEPIPVLPTVHYNMGGIPTNYK

SEQ ID NO: 5504 - protein, 17 aa, Homo Sapien
LPNFGFVVFDDSEPVQK

SEQ ID NO: 5505 - protein, 8 aa, Homo Sapien
LPNSVLGK

SEQ ID NO: 5506 - protein, 10 aa, Homo Sapien
LPPVLAIQLK

SEQ ID NO: 5507 - protein, 9 aa, Homo Sapien
LPSFELLHK

SEQ ID NO: 5508 - protein, 18 aa, Homo Sapien
LPSGLPVSLLTLYLDNNK

SEQ ID NO: 5509 - protein, 10 aa, Homo Sapien
LQAANAEDIK

SEQ ID NO: 5510 - protein, 26 aa, Homo Sapien
LQAELGIPGEQISPEDIVFMTIYHHK

SEQ ID NO: 5511 - protein, 13 aa, Homo Sapien
LQALDTGWNELHK

SEQ ID NO: 5512 - protein, 9 aa, Homo Sapien
LQDEIQNMK

SEQ ID NO: 5513 - protein, 14 aa, Homo Sapien
LQDSEEQVEAVNAK

SEQ ID NO: 5514 - protein, 9 aa, Homo Sapien
LQDTSSYAK

SEQ ID NO: 5515 - protein, 17 aa, Homo Sapien
LQEEISDLTEQLGSSGK

SEQ ID NO: 5516 - protein, 14 aa, Homo Sapien
LQEIEGPSVSIMEK

SEQ ID NO: 5517 - protein, 18 aa, Homo Sapien
LQIASDENYKDPTNLQGK

SEQ ID NO: 5518 - protein, 7 aa, Homo Sapien
LQLELSK

SEQ ID NO: 5519 - protein, 13 aa, Homo Sapien
LQLLSNLFHGMDK

SEQ ID NO: 5520 - protein, 14 aa, Homo Sapien
LQNELDTLKENNLK

SEQ ID NO: 5521 - protein, 18 aa, Homo Sapien
LQNEVESVTGMLNEAEGK

SEQ ID NO: 5522 - protein, 22 aa, Homo Sapien
LQPHEFQGGTFTISNLGMFGIK

SEQ ID NO: 5523 - protein, 19 aa, Homo Sapien
LQPTWNDLGDKYNSMEDAK

SEQ ID NO: 5524 - protein, 20 aa, Homo Sapien
LQQELEFLEVQEEYIKDEQK

SEQ ID NO: 5525 - protein, 18 aa, Homo Sapien
LQTASDESYKDPTNIQSK

SEQ ID NO: 5526 - protein, 9 aa, Homo Sapien
LQTAYAGEK

SEQ ID NO: 5527 - protein, 7 aa, Homo Sapien
LQTIFLK

SEQ ID NO: 5528 - protein, 18 aa, Homo Sapien
LQVELDNVTGLLSQSDSK

SEQ ID NO: 5529 - protein, 11 aa, Homo Sapien
LQVSQQEDITK

SEQ ID NO: 5530 - protein, 10 aa, Homo Sapien
LSDHSVEPGK

SEQ ID NO: 5531 - protein, 10 aa, Homo Sapien
LSEGVTISYK

SEQ ID NO: 5532 - protein, 11 aa, Homo Sapien
LSKDPNIVIAK

SEQ ID NO: 5533 - protein, 10 aa, Homo Sapien
LSLNIDPDAK

SEQ ID NO: 5534 - protein, 9 aa, Homo Sapien
LSNIFVIGK

SEQ ID NO: 5535 - protein, 27 aa, Homo Sapien
LSPKPGTGEPVLSLHYSTEGTTTSTIK

SEQ ID NO: 5536 - protein, 15 aa, Homo Sapien
LSSILPSQPDYNSSK

SEQ ID NO: 5537 - protein, 8 aa, Homo Sapien
LSSLPFQK

SEQ ID NO: 5538 - protein, 12 aa, Homo Sapien
LSSTWEGIQAGK

SEQ ID NO: 5539 - protein, 8 aa, Homo Sapien
LTDTLVSK

SEQ ID NO: 5540 - protein, 10 aa, Homo Sapien
LTELGTVDPK

SEQ ID NO: 5541 - protein, 12 aa, Homo Sapien
LTGAIMHYGNMK

SEQ ID NO: 5542 - protein, 15 aa, Homo Sapien
LTGKDVNFEFPEFQL

SEQ ID NO: 5543 - protein, 31 aa, Homo Sapien
LTGLTSSIPEMILGHLFSQEELSGNSELIQK

SEQ ID NO: 5544 - protein, 19 aa, Homo Sapien
LTHVDSPLEAPAGPLGQVK

SEQ ID NO: 5545 - protein, 12 aa, Homo Sapien
LTLHGLQQYYVK

SEQ ID NO: 5546 - protein, 10 aa, Homo Sapien
LTLSALIDGK

SEQ ID NO: 5547 - protein, 10 aa, Homo Sapien
LTLSALLDGK

SEQ ID NO: 5548 - protein, 18 aa, Homo Sapien
LTLSALLDGKNVNAGGHK

SEQ ID NO: 5549 - protein, 9 aa, Homo Sapien
LTPTHYLTK

SEQ ID NO: 5550 - protein, 12 aa, Homo Sapien
LTQYMDGSGMPK

SEQ ID NO: 5551 - protein, 7 aa, Homo Sapien
LTTLVEK

SEQ ID NO: 5552 - protein, 8 aa, Homo Sapien
LTVLNMMK

SEQ ID NO: 5553 - protein, 17 aa, Homo Sapien
LTVLPPELGNLDLTGQK

SEQ ID NO: 5554 - protein, 11 aa, Homo Sapien
LTYTAEVSVPK

SEQ ID NO: 5555 - protein, 7 aa, Homo Sapien
LVDEAFK

SEQ ID NO: 5556 - protein, 24 aa, Homo Sapien
LVEGILHAPDAGWGNLVYVVNYPK

SEQ ID NO: 5557 - protein, 15 aa, Homo Sapien
LVESELLEILTVVGK

SEQ ID NO: 5558 - protein, 19 aa, Homo Sapien
LVFVHSAEGNEFWSALLEK

SEQ ID NO: 5559 - protein, 13 aa, Homo Sapien
LVGQSIIAYLQKK

SEQ ID NO: 5560 - protein, 17 aa, Homo Sapien
LVKPGNQNTQVTEAWNK

SEQ ID NO: 5561 - protein, 20 aa, Homo Sapien
LVLEQVVTSIASVADTAEEK

SEQ ID NO: 5562 - protein, 15 aa, Homo Sapien
LVLLELNFLPTTGTK

SEQ ID NO: 5563 - protein, 12 aa, Homo Sapien
LVNTPYVDNSYK

SEQ ID NO: 5564 - protein, 9 aa, Homo Sapien
LVPLKETIK

SEQ ID NO: 5565 - protein, 16 aa, Homo Sapien
LVPLVQATFPENAVTK

SEQ ID NO: 5566 - protein, 11 aa, Homo Sapien
LVPPSVELDVK

SEQ ID NO: 5567 - protein, 10 aa, Homo Sapien
LVQAFQFTDK

SEQ ID NO: 5568 - protein, 21 aa, Homo Sapien
LVQIEYALAAVAGGAPSVGIK

SEQ ID NO: 5569 - protein, 13 aa, Homo Sapien
LVSEFPYIEAEVK

SEQ ID NO: 5570 - protein, 11 aa, Homo Sapien
LVSELWDAGIK

SEQ ID NO: 5571 - protein, 15 aa, Homo Sapien
LVSIGAEEIVDGNAK

SEQ ID NO: 5572 - protein, 20 aa, Homo Sapien
LVSNHSLHETSSVFVDSLTK

SEQ ID NO: 5573 - protein, 19 aa, Homo Sapien
LVSQDNFGFDLPAVEAATK

SEQ ID NO: 5574 - protein, 12 aa, Homo Sapien
LVTLPVSFAQLK

SEQ ID NO: 5575 - protein, 8 aa, Homo Sapien
LVTTGVLK

SEQ ID NO: 5576 - protein, 11 aa, Homo Sapien
LVVVGGGGVGK

SEQ ID NO: 5577 - protein, 8 aa, Homo Sapien
LWLLDDSK

SEQ ID NO: 5578 - protein, 8 aa, Homo Sapien
LYEQLSGK

SEQ ID NO: 5579 - protein, 13 aa, Homo Sapien
LYKEELEQTYHAK

SEQ ID NO: 5580 - protein, 17 aa, Homo Sapien
LYLSHNQLSEIPLNLPK

SEQ ID NO: 5581 - protein, 9 aa, Homo Sapien
LYMVLITTK

SEQ ID NO: 5582 - protein, 7 aa, Homo Sapien
LYNLFLK

SEQ ID NO: 5583 - protein, 12 aa, Homo Sapien
LYQQTLLQDGLK

SEQ ID NO: 5584 - protein, 19 aa, Homo Sapien
LYQQTLLQDGLKDMLDHGK

SEQ ID NO: 5585 - protein, 14 aa, Homo Sapien
LYQTDPSGTYHAWK

SEQ ID NO: 5586 - protein, 14 aa, Homo Sapien
LYSPSQIGAFVLMK

SEQ ID NO: 5587 - protein, 19 aa, Homo Sapien
LYSTWIGGSILASLDTFKK

SEQ ID NO: 5588 - protein, 9 aa, Homo Sapien
LYSVSYLLK

SEQ ID NO: 5589 - protein, 21 aa, Homo Sapien
LYTEGYQVPPGATYTAIEAPK

SEQ ID NO: 5590 - protein, 12 aa, Homo Sapien
MADKDGDLIATK

SEQ ID NO: 5591 - protein, 9 aa, Homo Sapien
MADLSELLK

SEQ ID NO: 5592 - protein, 9 aa, Homo Sapien
MADVSAEEK

SEQ ID NO: 5593 - protein, 12 aa, Homo Sapien
MAENLGFVGPLK

SEQ ID NO: 5594 - protein, 17 aa, Homo Sapien
MASTFIGNSTAIQELFK

SEQ ID NO: 5595 - protein, 17 aa, Homo Sapien
MEEGEVYAIETFGSTGK

SEQ ID NO: 5596 - protein, 17 aa, Homo Sapien
MFFGEGQASLSFSHLHK

SEQ ID NO: 5597 - protein, 13 aa, Homo Sapien
MFIGGLSWDTTKK

SEQ ID NO: 5598 - protein, 19 aa, Homo Sapien
MFTAGIDLMDMASDILQPK

SEQ ID NO: 5599 - protein, 16 aa, Homo Sapien
MGLVDQLVEPLGPGLK

SEQ ID NO: 5600 - protein, 13 aa, Homo Sapien
MHEDINEEWISDK

SEQ ID NO: 5601 - protein, 12 aa, Homo Sapien
MIAILTENYGGK

SEQ ID NO: 5602 - protein, 11 aa, Homo Sapien
MIMTNPIATGK

SEQ ID NO: 5603 - protein, 20 aa, Homo Sapien
MIQDGKGDVTITNDGATILK

SEQ ID NO: 5604 - protein, 13 aa, Homo Sapien
MIVDPVEPHGEMK

SEQ ID NO: 5605 - protein, 11 aa, Homo Sapien
MKEIAEAYLGK

SEQ ID NO: 5606 - protein, 11 aa, Homo Sapien
MKETAEAYLGK

SEQ ID NO: 5607 - protein, 14 aa, Homo Sapien
MKETAENYLGHTAK

SEQ ID NO: 5608 - protein, 17 aa, Homo Sapien
MKPLMGVIYVPLTDKEK

SEQ ID NO: 5609 - protein, 13 aa, Homo Sapien
MLAPEGALNIHEK

SEQ ID NO: 5610 - protein, 8 aa, Homo Sapien
MLEIDPQK

SEQ ID NO: 5611 - protein, 13 aa, Homo Sapien
MLNIHPSLLPSFK

SEQ ID NO: 5612 - protein, 16 aa, Homo Sapien
MLTGPVYSQSTALTHK

SEQ ID NO: 5613 - protein, 20 aa, Homo Sapien
MLVDDIGDVTITNDGATILK

SEQ ID NO: 5614 - protein, 9 aa, Homo Sapien
MNEVISLWK

SEQ ID NO: 5615 - protein, 9 aa, Homo Sapien
MNVLADALK

SEQ ID NO: 5616 - protein, 10 aa, Homo Sapien
MPILGLGTWK

SEQ ID NO: 5617 - protein, 21 aa, Homo Sapien
MPLATSTDHGHNLQTVQLLIK

SEQ ID NO: 5618 - protein, 10 aa, Homo Sapien
MPLIGLGTWK

SEQ ID NO: 5619 - protein, 17 aa, Homo Sapien
MQEVVANLQYDDGSGMK

SEQ ID NO: 5620 - protein, 17 aa, Homo Sapien
MQINAEEVVVGDLVEVK

SEQ ID NO: 5621 - protein, 7 aa, Homo Sapien
MQVDPQK

SEQ ID NO: 5622 - protein, 9 aa, Homo Sapien
MSDGLFLQK

SEQ ID NO: 5623 - protein, 9 aa, Homo Sapien
MTAMDNASK

SEQ ID NO: 5624 - protein, 9 aa, Homo Sapien
MTELYDYPK

SEQ ID NO: 5625 - protein, 11 aa, Homo Sapien
MTESSLPSASK

SEQ ID NO: 5626 - protein, 12 aa, Homo Sapien
MTGLVDEAIDTK

SEQ ID NO: 5627 - protein, 20 aa, Homo Sapien
MTLDTLSIYETPSMGLLDKK

SEQ ID NO: 5628 - protein, 18 aa, Homo Sapien
MVIPGGIDVHTHFQMPYK

SEQ ID NO: 5629 - protein, 10 aa, Homo Sapien
MVNHFIAEFK

SEQ ID NO: 5630 - protein, 13 aa, Homo Sapien
MVVPVAALFTPLK

SEQ ID NO: 5631 - protein, 12 aa, Homo Sapien
MWEVLESTTQTK

SEQ ID NO: 5632 - protein, 13 aa, Homo Sapien
MYDAQQQQVGTNK

SEQ ID NO: 5633 - protein, 21 aa, Homo Sapien
MYYSAVDPTKDIFTGLIGPMK

SEQ ID NO: 5634 - protein, 12 aa, Homo Sapien
NADGYIDLDELK

SEQ ID NO: 5635 - protein, 9 aa, Homo Sapien
NADQEELVK

SEQ ID NO: 5636 - protein, 10 aa, Homo Sapien
NAEQAATQLK

SEQ ID NO: 5637 - protein, 13 aa, Homo Sapien
NAGNEQDLGIQYK

SEQ ID NO: 5638 - protein, 16 aa, Homo Sapien
NAGYGGLGLSIEGPSK

SEQ ID NO: 5639 - protein, 15 aa, Homo Sapien
NAKLVGQSIIAYLQK

SEQ ID NO: 5640 - protein, 11 aa, Homo Sapien
NALESYAFNMK

SEQ ID NO: 5641 - protein, 17 aa, Homo Sapien
NATNVEQAFMTMAAEIK

SEQ ID NO: 5642 - protein, 17 aa, Homo Sapien
NATNVEQSFMTMAAEIK

SEQ ID NO: 5643 - protein, 10 aa, Homo Sapien
NDDIADGNPK

SEQ ID NO: 5644 - protein, 11 aa, Homo Sapien
NDLVISETELK

SEQ ID NO: 5645 - protein, 17 aa, Homo Sapien
NDYKLVTDTPVYVQAVK

SEQ ID NO: 5646 - protein, 11 aa, Homo Sapien
NEAGEAHASIK

SEQ ID NO: 5647 - protein, 10 aa, Homo Sapien
NEAYKEDYHK

SEQ ID NO: 5648 - protein, 11 aa, Homo Sapien
NEEKPVQMMFK

SEQ ID NO: 5649 - protein, 10 aa, Homo Sapien
NEFWSALLEK

SEQ ID NO: 5650 - protein, 14 aa, Homo Sapien
NEMATAASSSSLEK

SEQ ID NO: 5651 - protein, 17 aa, Homo Sapien
NENGAPEDEENFEEAIK

SEQ ID NO: 5652 - protein, 15 aa, Homo Sapien
NFGDLVSIQSESEKK

SEQ ID NO: 5653 - protein, 20 aa, Homo Sapien
NFGEEVDDESLKELFSQFGK

SEQ ID NO: 5654 - protein, 20 aa, Homo Sapien
NFGIVEGLMTTVHAITATQK

SEQ ID NO: 5655 - protein, 15 aa, Homo Sapien
NFINNPLAQADWAAK

SEQ ID NO: 5656 - protein, 8 aa, Homo Sapien
NFLPHFGK

SEQ ID NO: 5657 - protein, 16 aa, Homo Sapien
NFMLTQPHSVSESPGK

SEQ ID NO: 5658 - protein, 11 aa, Homo Sapien
NFSDNQLQEGK

SEQ ID NO: 5659 - protein, 8 aa, Homo Sapien
NFSVNLYK

SEQ ID NO: 5660 - protein, 15 aa, Homo Sapien
NGETVPIDEQFDKEK

SEQ ID NO: 5661 - protein, 9 aa, Homo Sapien
NGKYDLDFK

SEQ ID NO: 5662 - protein, 10 aa, Homo Sapien
NGQDLGVAFK

SEQ ID NO: 5663 - protein, 27 aa, Homo Sapien
NGSTLKETAIELGYLTAEQFDEWVKPK

SEQ ID NO: 5664 - protein, 13 aa, Homo Sapien
NGVAPGAQILSIK

SEQ ID NO: 5665 - protein, 10 aa, Homo Sapien
NGVEIEMSEK

SEQ ID NO: 5666 - protein, 14 aa, Homo Sapien
NHQNLLDSLEQYVK

SEQ ID NO: 5667 - protein, 22 aa, Homo Sapien
NIDGEAWVANESFYPVFTPPVK

SEQ ID NO: 5668 - protein, 18 aa, Homo Sapien
NIEVMNSFELLSHTVEEK

SEQ ID NO: 5669 - protein, 24 aa, Homo Sapien
NIGDINQDGYPDIAVGAPYDDLGK

SEQ ID NO: 5670 - protein, 14 aa, Homo Sapien
NIIHGSDSVESAEK

SEQ ID NO: 5671 - protein, 11 aa, Homo Sapien
NIIPASTGAAK

SEQ ID NO: 5672 - protein, 13 aa, Homo Sapien
NILFVITKPDVYK

SEQ ID NO: 5673 - protein, 15 aa, Homo Sapien
NILQLHDLTTGALLK

SEQ ID NO: 5674 - protein, 11 aa, Homo Sapien
NILTSNNIDVK

SEQ ID NO: 5675 - protein, 12 aa, Homo Sapien
NIPGITLLNVSK

SEQ ID NO: 5676 - protein, 21 aa, Homo Sapien
NIPTVNENLENYYLEVNQLEK

SEQ ID NO: 5677 - protein, 11 aa, Homo Sapien
NIQFEAFHVFK

SEQ ID NO: 5678 - protein, 23 aa, Homo Sapien
NITLSLVANPSHLEAADPVVMGK

SEQ ID NO: 5679 - protein, 15 aa, Homo Sapien
NKDPLNDTVVGLYQK

SEQ ID NO: 5680 - protein, 10 aa, Homo Sapien
NKLDHYAIIK

SEQ ID NO: 5681 - protein, 9 aa, Homo Sapien
NKPLFFADK

SEQ ID NO: 5682 - protein, 12 aa, Homo Sapien
NKPLFFADKLYK

SEQ ID NO: 5683 - protein, 13 aa, Homo Sapien
NLATTVTEEILEK

SEQ ID NO: 5684 - protein, 17 aa, Homo Sapien
NLDYVATSIHEAVTKIQ

SEQ ID NO: 5685 - protein, 24 aa, Homo Sapien
NLEVLNFFNNQIEELPTQISSLQK

SEQ ID NO: 5686 - protein, 12 aa, Homo Sapien
NLFWTSYDTNKK

SEQ ID NO: 5687 - protein, 14 aa, Homo Sapien
NLLLLANSTEEQQK

SEQ ID NO: 5688 - protein, 12 aa, Homo Sapien
NLLVENIIDIYK

SEQ ID NO: 5689 - protein, 11 aa, Homo Sapien
NLMNAVVQTVK

SEQ ID NO: 5690 - protein, 16 aa, Homo Sapien
NLNAPVQPFEDPEHMK

SEQ ID NO: 5691 - protein, 18 aa, Homo Sapien
NLNLNDESQHGLLMQLLK

SEQ ID NO: 5692 - protein, 9 aa, Homo Sapien
NLPFDFTWK

SEQ ID NO: 5693 - protein, 14 aa, Homo Sapien
NLPIYSEEIVEMYK

SEQ ID NO: 5694 - protein, 16 aa, Homo Sapien
NLQPASEYTVSLVAIK

SEQ ID NO: 5695 - protein, 15 aa, Homo Sapien
NLTEELSGLDETIAK

SEQ ID NO: 5696 - protein, 15 aa, Homo Sapien
NLTNPNTVIILIGNK

SEQ ID NO: 5697 - protein, 14 aa, Homo Sapien
NLVDPFVEVSFAGK

SEQ ID NO: 5698 - protein, 11 aa, Homo Sapien
NLVELAELELK

SEQ ID NO: 5699 - protein, 13 aa, Homo Sapien
NLVHIITHGEEKD

SEQ ID NO: 5700 - protein, 8 aa, Homo Sapien
NLVLAGIK

SEQ ID NO: 5701 - protein, 14 aa, Homo Sapien
NLVNDDDAIVAASK

SEQ ID NO: 5702 - protein, 17 aa, Homo Sapien
NMAEQIIQEIYSQIQSK

SEQ ID NO: 5703 - protein, 11 aa, Homo Sapien
NMDNLKPAFAK

SEQ ID NO: 5704 - protein, 12 aa, Homo Sapien
NNASTDYDLSDK

SEQ ID NO: 5705 - protein, 20 aa, Homo Sapien
NNQFQALLQYADPVSAQHAK

SEQ ID NO: 5706 - protein, 13 aa, Homo Sapien
NNVAFMSYFLQGK

SEQ ID NO: 5707 - protein, 23 aa, Homo Sapien
NNVATLVFNQVDINDSGEYICKA

SEQ ID NO: 5708 - protein, 15 aa, Homo Sapien
NNVILQPLQPDTPYK

SEQ ID NO: 5709 - protein, 7 aa, Homo Sapien
NPDPWAK

SEQ ID NO: 5710 - protein, 14 aa, Homo Sapien
NPELQNLLLDDFFK

SEQ ID NO: 5711 - protein, 13 aa, Homo Sapien
NPEQVDLYQFMAK

SEQ ID NO: 5712 - protein, 9 aa, Homo Sapien
NPEVTTITK

SEQ ID NO: 5713 - protein, 14 aa, Homo Sapien
NPNTSEPQHLLVMK

SEQ ID NO: 5714 - protein, 8 aa, Homo Sapien
NPPDIVGK

SEQ ID NO: 5715 - protein, 29 aa, Homo Sapien
NPVNYFAEVEQIAFDPSNMPPGIEASPDK

SEQ ID NO: 5716 - protein, 19 aa, Homo Sapien
NPYYGGESSSITPLEELYK

SEQ ID NO: 5717 - protein, 20 aa, Homo Sapien
NQDLAPNSAEQASILSLVTK

SEQ ID NO: 5718 - protein, 20 aa, Homo Sapien
NQELLQSQLTEKDSMIENMK

SEQ ID NO: 5719 - protein, 15 aa, Homo Sapien
NQEQLAAELAEFTAK

SEQ ID NO: 5720 - protein, 9 aa, Homo Sapien
NQLKELPEK

SEQ ID NO: 5721 - protein, 12 aa, Homo Sapien
NQMAEKDEYEHK

SEQ ID NO: 5722 - protein, 12 aa, Homo Sapien
NQNSWGTGEDVK

SEQ ID NO: 5723 - protein, 14 aa, Homo Sapien
NQTAEKEEFEHQQK

SEQ ID NO: 5724 - protein, 9 aa, Homo Sapien
NQWIDNVEK

SEQ ID NO: 5725 - protein, 15 aa, Homo Sapien
NSDPLVGVILDNGGK

SEQ ID NO: 5726 - protein, 12 aa, Homo Sapien
NSDVEIFAVGVK

SEQ ID NO: 5727 - protein, 11 aa, Homo Sapien
NSIVNSQPPEK

SEQ ID NO: 5728 - protein, 8 aa, Homo Sapien
NSLFEYQK

SEQ ID NO: 5729 - protein, 15 aa, Homo Sapien
NSQSFFSGLFGGSSK

SEQ ID NO: 5730 - protein, 16 aa, Homo Sapien
NSVNPVWNEGFEWDLK

SEQ ID NO: 5731 - protein, 13 aa, Homo Sapien
NSVSQISVLSGGK

SEQ ID NO: 5732 - protein, 9 aa, Homo Sapien
NSYLEVLLK

SEQ ID NO: 5733 - protein, 15 aa, Homo Sapien
NTDQASMPDNTAAQK

SEQ ID NO: 5734 - protein, 11 aa, Homo Sapien
NTISLLVAGLK

SEQ ID NO: 5735 - protein, 12 aa, Homo Sapien
NTISLLVAGLKK

SEQ ID NO: 5736 - protein, 14 aa, Homo Sapien
NTQIIIQEESGIPK

SEQ ID NO: 5737 - protein, 10 aa, Homo Sapien
NTSDVISAAK

SEQ ID NO: 5738 - protein, 11 aa, Homo Sapien
NTTGVTEEALK

SEQ ID NO: 5739 - protein, 12 aa, Homo Sapien
NVDILKDPETVK

SEQ ID NO: 5740 - protein, 18 aa, Homo Sapien
NVDLLSDMVQEHDEPILK

SEQ ID NO: 5741 - protein, 18 aa, Homo Sapien
NVFDEAILAALEPPEPKK

SEQ ID NO: 5742 - protein, 9 aa, Homo Sapien
NVISSSSFK

SEQ ID NO: 5743 - protein, 9 aa, Homo Sapien
NVKPDQWVK

SEQ ID NO: 5744 - protein, 26 aa, Homo Sapien
NVLLDPQLVPGGGASEMAVAHALTEK

SEQ ID NO: 5745 - protein, 18 aa, Homo Sapien
NVLSLTNKGEVFNELVGK

SEQ ID NO: 5746 - protein, 9 aa, Homo Sapien
NVPVITGSK

SEQ ID NO: 5747 - protein, 11 aa, Homo Sapien
NVQPSDQGHYK

SEQ ID NO: 5748 - protein, 9 aa, Homo Sapien
NVTLPAVFK

SEQ ID NO: 5749 - protein, 6 aa, Homo Sapien
NWIQYK

SEQ ID NO: 5750 - protein, 7 aa, Homo Sapien
NYKNVFK

SEQ ID NO: 5751 - protein, 8 aa, Homo Sapien
NYLSPTFK

SEQ ID NO: 5752 - protein, 13 aa, Homo Sapien
NYPATFWVNPQFK

SEQ ID NO: 5753 - protein, 15 aa, Homo Sapien
NYPNTFWMNPQYLIK

SEQ ID NO: 5754 - protein, 9 aa, Homo Sapien
NYTDNELEK

SEQ ID NO: 5755 - protein, 8 aa, Homo Sapien
NYYEQWGK

SEQ ID NO: 5756 - protein, 23 aa, Homo Sapien
PAADLSEQISTAGTEASGTGNMK

SEQ ID NO: 5757 - protein, 9 aa, Homo Sapien
PAAVVLQTK

SEQ ID NO: 5758 - protein, 18 aa, Homo Sapien
PALLHSTFFPALQGAQTK

SEQ ID NO: 5759 - protein, 17 aa, Homo Sapien
PAMAATSFILMTTFPNK

SEQ ID NO: 5760 - protein, 12 aa, Homo Sapien
PASTLNVAGPFK

SEQ ID NO: 5761 - protein, 9 aa, Homo Sapien
PATFTIVTK

SEQ ID NO: 5762 - protein, 13 aa, Homo Sapien
PAYLAETLYYAMK

SEQ ID NO: 5763 - protein, 11 aa, Homo Sapien
PDLELADDLKK

SEQ ID NO: 5764 - protein, 16 aa, Homo Sapien
PEEHPTLLTEAPLNPK

SEQ ID NO: 5765 - protein, 13 aa, Homo Sapien
PFFGIVPVLMDEK

SEQ ID NO: 5766 - protein, 12 aa, Homo Sapien
PHENGVHSIDVK

SEQ ID NO: 5767 - protein, 10 aa, Homo Sapien
PIILVGPSLK

SEQ ID NO: 5768 - protein, 12 aa, Homo Sapien
PIKPPGPPINPK

SEQ ID NO: 5769 - protein, 15 aa, Homo Sapien
PLISVYSEKGESSGK

SEQ ID NO: 5770 - protein, 11 aa, Homo Sapien
PLLGLILLNEK

SEQ ID NO: 5771 - protein, 9 aa, Homo Sapien
PLPVISWAK

SEQ ID NO: 5772 - protein, 14 aa, Homo Sapien
PNALSALSDLHAHK

SEQ ID NO: 5773 - protein, 10 aa, Homo Sapien
PQQAQEVHEK

SEQ ID NO: 5774 - protein, 18 aa, Homo Sapien
PQYMVLVPSLLHTETTEK

SEQ ID NO: 5775 - protein, 23 aa, Homo Sapien
PTTQQSPQDEQEKLLDEAIQAVK

SEQ ID NO: 5776 - protein, 10 aa, Homo Sapien
PVKDVVDPGK

SEQ ID NO: 5777 - protein, 19 aa, Homo Sapien
PVTVEPMDQLDDEEGLPEK

SEQ ID NO: 5778 - protein, 10 aa, Homo Sapien
QADVNLVNAK

SEQ ID NO: 5779 - protein, 18 aa, Homo Sapien
QAEAEGEGWEYASLFGWK

SEQ ID NO: 5780 - protein, 12 aa, Homo Sapien
QAGEVTYADAHK

SEQ ID NO: 5781 - protein, 23 aa, Homo Sapien
QAIVDKVPSVSSSALVSSLHLLK

SEQ ID NO: 5782 - protein, 14 aa, Homo Sapien
QAMTSIWNALVTDK

SEQ ID NO: 5783 - protein, 14 aa, Homo Sapien
QASPNIVIALSGNK

SEQ ID NO: 5784 - protein, 14 aa, Homo Sapien
QASPSIVIALAGNK

SEQ ID NO: 5785 - protein, 9 aa, Homo Sapien
QAWEADKTK

SEQ ID NO: 5786 - protein, 14 aa, Homo Sapien
QDILDDSGYVSAYK

SEQ ID NO: 5787 - protein, 13 aa, Homo Sapien
QEDDLANINQWVK

SEQ ID NO: 5788 - protein, 8 aa, Homo Sapien
QEFDLENK

SEQ ID NO: 5789 - protein, 10 aa, Homo Sapien
QEQIQVTHGK

SEQ ID NO: 5790 - protein, 9 aa, Homo Sapien
QEVISTSSK

SEQ ID NO: 5791 - protein, 9 aa, Homo Sapien
QFAALVASK

SEQ ID NO: 5792 - protein, 19 aa, Homo Sapien
QFEMEELILELAAQVLEDK

SEQ ID NO: 5793 - protein, 14 aa, Homo Sapien
QFFPTDEDEIGAAK

SEQ ID NO: 5794 - protein, 16 aa, Homo Sapien
QFGAQANVIGPWIQTK

SEQ ID NO: 5795 - protein, 25 aa, Homo Sapien
QFLQAAEAIDDIPFGITSNSDVFSK

SEQ ID NO: 5796 - protein, 14 aa, Homo Sapien
QFQDAGHFDAENIK

SEQ ID NO: 5797 - protein, 14 aa, Homo Sapien
QFVTPADVVSGNPK

SEQ ID NO: 5798 - protein, 20 aa, Homo Sapien
QGAIVAVTGDGVNDSPALKK

SEQ ID NO: 5799 - protein, 10 aa, Homo Sapien
QGFVPAAYVK

SEQ ID NO: 5800 - protein, 10 aa, Homo Sapien
QGIQFYTQLK

SEQ ID NO: 5801 - protein, 22 aa, Homo Sapien
QGLLPLTFADPADYNKIHPVDK

SEQ ID NO: 5802 - protein, 13 aa, Homo Sapien
QGNMTAALQAALK

SEQ ID NO: 5803 - protein, 10 aa, Homo Sapien
QHGSNTFTVK

SEQ ID NO: 5804 - protein, 8 aa, Homo Sapien
QIDNPDYK

SEQ ID NO: 5805 - protein, 13 aa, Homo Sapien
QIEELKGQEVSPK

SEQ ID NO: 5806 - protein, 8 aa, Homo Sapien
QIEEQTIK

SEQ ID NO: 5807 - protein, 24 aa, Homo Sapien
QIGWLTEQLPSGGTAPTLALLTEK

SEQ ID NO: 5808 - protein, 8 aa, Homo Sapien
QIIDAINK

SEQ ID NO: 5809 - protein, 18 aa, Homo Sapien
QIKPYTLMSMVANLLYEK

SEQ ID NO: 5810 - protein, 16 aa, Homo Sapien
QIQELVEAIVLPMNHK

SEQ ID NO: 5811 - protein, 8 aa, Homo Sapien
QISDILYK

SEQ ID NO: 5812 - protein, 13 aa, Homo Sapien
QISQAYEVLSDAK

SEQ ID NO: 5813 - protein, 21 aa, Homo Sapien
QITDNIFLTTAEVIAQQVSDK

SEQ ID NO: 5814 - protein, 13 aa, Homo Sapien
QITSHLLDMLVSK

SEQ ID NO: 5815 - protein, 14 aa, Homo Sapien
QITSHLLDMLVSKK

SEQ ID NO: 5816 - protein, 13 aa, Homo Sapien
QKASTHETWAYGK

SEQ ID NO: 5817 - protein, 13 aa, Homo Sapien
QKDYETATLSEIK

SEQ ID NO: 5818 - protein, 14 aa, Homo Sapien
QKTPPPVAPKPAVK

SEQ ID NO: 5819 - protein, 9 aa, Homo Sapien
QLADETLLK

SEQ ID NO: 5820 - protein, 8 aa, Homo Sapien
QLASVILK

SEQ ID NO: 5821 - protein, 12 aa, Homo Sapien
QLDAGEEATTTK

SEQ ID NO: 5822 - protein, 18 aa, Homo Sapien
QLDDKDEEINQQSQLVEK

SEQ ID NO: 5823 - protein, 12 aa, Homo Sapien
QLEMILNKPGLK

SEQ ID NO: 5824 - protein, 11 aa, Homo Sapien
QLEPVYNSLAK

SEQ ID NO: 5825 - protein, 21 aa, Homo Sapien
QLGIIPLLDPEDVFTENPDEK

SEQ ID NO: 5826 - protein, 19 aa, Homo Sapien
QLIVGVNKMDSTEPAYSEK

SEQ ID NO: 5827 - protein, 11 aa, Homo Sapien
QLLEQPQAEAK

SEQ ID NO: 5828 - protein, 23 aa, Homo Sapien
QLLHNFPPDQLTSSGAPFWSGPK

SEQ ID NO: 5829 - protein, 8 aa, Homo Sapien
QLLYDAIK

SEQ ID NO: 5830 - protein, 11 aa, Homo Sapien
QLNEINYEDHK

SEQ ID NO: 5831 - protein, 11 aa, Homo Sapien
QLQAETEPIVK

SEQ ID NO: 5832 - protein, 8 aa, Homo Sapien
QLSESQVK

SEQ ID NO: 5833 - protein, 18 aa, Homo Sapien
QLSQSLLPAIVELAEDAK

SEQ ID NO: 5834 - protein, 9 aa, Homo Sapien
QLTFEEIAK

SEQ ID NO: 5835 - protein, 8 aa, Homo Sapien
QLVSNLEK

SEQ ID NO: 5836 - protein, 15 aa, Homo Sapien
QMGSGDAYPHQYSLK

SEQ ID NO: 5837 - protein, 8 aa, Homo Sapien
QMVETELK

SEQ ID NO: 5838 - protein, 13 aa, Homo Sapien
QNCELFEQLGEYK

SEQ ID NO: 5839 - protein, 12 aa, Homo Sapien
QNIIPASTGAAK

SEQ ID NO: 5840 - protein, 11 aa, Homo Sapien
QNLDALLNQLK

SEQ ID NO: 5841 - protein, 13 aa, Homo Sapien
QNQGAAPEIQALK

SEQ ID NO: 5842 - protein, 16 aa, Homo Sapien
QPQGHLLLIGVSGAGK

SEQ ID NO: 5843 - protein, 8 aa, Homo Sapien
QQFDLENK

SEQ ID NO: 5844 - protein, 8 aa, Homo Sapien
QQILLSFK

SEQ ID NO: 5845 - protein, 9 aa, Homo Sapien
QQNFNTGIK

SEQ ID NO: 5846 - protein, 13 aa, Homo Sapien
QQQEILAAKPWTK

SEQ ID NO: 5847 - protein, 12 aa, Homo Sapien
QQQPPPETFDFK

SEQ ID NO: 5848 - protein, 26 aa, Homo Sapien
QSAEMEKANFTSVVDTPEIIHAQQVK

SEQ ID NO: 5849 - protein, 12 aa, Homo Sapien
QSIINPDWNFEK

SEQ ID NO: 5850 - protein, 12 aa, Homo Sapien
QSNPLLIHVDTK

SEQ ID NO: 5851 - protein, 24 aa, Homo Sapien
QSTQVMAASMSAFDPLKNQDEINK

SEQ ID NO: 5852 - protein, 8 aa, Homo Sapien
QSVEDILK

SEQ ID NO: 5853 - protein, 8 aa, Homo Sapien
QSVTNSIK

SEQ ID NO: 5854 - protein, 15 aa, Homo Sapien
QTLQSATVEAIEAEK

SEQ ID NO: 5855 - protein, 8 aa, Homo Sapien
QTSGMEYK

SEQ ID NO: 5856 - protein, 19 aa, Homo Sapien
QTTVSNSQQAYQEAFEISK

SEQ ID NO: 5857 - protein, 20 aa, Homo Sapien
QTTVSNSQQAYQEAFEISKK

SEQ ID NO: 5858 - protein, 9 aa, Homo Sapien
QTVAVGVIK

SEQ ID NO: 5859 - protein, 12 aa, Homo Sapien
QVDGDNSHVEMK

SEQ ID NO: 5860 - protein, 11 aa, Homo Sapien
QVEDDIQQLLK

SEQ ID NO: 5861 - protein, 8 aa, Homo Sapien
QVFLATWK

SEQ ID NO: 5862 - protein, 11 aa, Homo Sapien
QVLLAQAEAEK

SEQ ID NO: 5863 - protein, 10 aa, Homo Sapien
QVLLGDQIPK

SEQ ID NO: 5864 - protein, 15 aa, Homo Sapien
QVPNESFFNFFNPLK

SEQ ID NO: 5865 - protein, 9 aa, Homo Sapien
QVSYKGETK

SEQ ID NO: 5866 - protein, 14 aa, Homo Sapien
QVVEEPSPQLPADK

SEQ ID NO: 5867 - protein, 11 aa, Homo Sapien
QVYVDKLAELK

SEQ ID NO: 5868 - protein, 10 aa, Homo Sapien
QYTGINAISK

SEQ ID NO: 5869 - protein, 7 aa, Homo Sapien
SADAMLK

SEQ ID NO: 5870 - protein, 15 aa, Homo Sapien
SADAPMFVMGVNHEK

SEQ ID NO: 5871 - protein, 13 aa, Homo Sapien
SAENIVGIGKPSK

SEQ ID NO: 5872 - protein, 18 aa, Homo Sapien
SAESPTSPVTSETGSTFK

SEQ ID NO: 5873 - protein, 22 aa, Homo Sapien
SAGQGEVLVYVEDPAGHQEEAK

SEQ ID NO: 5874 - protein, 16 aa, Homo Sapien
SALASVIMGLSPILGK

SEQ ID NO: 5875 - protein, 15 aa, Homo Sapien
SALFAQLNQGEAITK

SEQ ID NO: 5876 - protein, 12 aa, Homo Sapien
SAPNYLDVYNNK

SEQ ID NO: 5877 - protein, 18 aa, Homo Sapien
SAPSADAPMFVMGVNHEK

SEQ ID NO: 5878 - protein, 11 aa, Homo Sapien
SASNMAIVDVK

SEQ ID NO: 5879 - protein, 9 aa, Homo Sapien
SAVEDEGLK

SEQ ID NO: 5880 - protein, 8 aa, Homo Sapien
SAVLISSK

SEQ ID NO: 5881 - protein, 16 aa, Homo Sapien
SDALETLGFLNHYQMK

SEQ ID NO: 5882 - protein, 16 aa, Homo Sapien
SDGGYTYDTSDLAAIK

SEQ ID NO: 5883 - protein, 16 aa, Homo Sapien
SDGKIDVSIEAASGGK

SEQ ID NO: 5884 - protein, 13 aa, Homo Sapien
SDGTETSTNLHQK

SEQ ID NO: 5885 - protein, 20 aa, Homo Sapien
SDKDLETQVIQLNEQVHSLK

SEQ ID NO: 5886 - protein, 15 aa, Homo Sapien
SDQVNGVLVLSLLDK

SEQ ID NO: 5887 - protein, 10 aa, Homo Sapien
SDSSMDHFQK

SEQ ID NO: 5888 - protein, 10 aa, Homo Sapien
SDVVYTDWKK

SEQ ID NO: 5889 - protein, 18 aa, Homo Sapien
SDYLNTFEFMDKLGENLK

SEQ ID NO: 5890 - protein, 17 aa, Homo Sapien
SEETKENEGFTVTAEGK

SEQ ID NO: 5891 - protein, 19 aa, Homo Sapien
SEFKLEIDDLSSSMESVSK

SEQ ID NO: 5892 - protein, 19 aa, Homo Sapien
SEFKLELDDVTSNMEQIIK

SEQ ID NO: 5893 - protein, 11 aa, Homo Sapien
SEILAHWSPAK

SEQ ID NO: 5894 - protein, 9 aa, Homo Sapien
SELELTLGK

SEQ ID NO: 5895 - protein, 9 aa, Homo Sapien
SELSGNFEK

SEQ ID NO: 5896 - protein, 16 aa, Homo Sapien
SETSGSFEDALLAIVK

SEQ ID NO: 5897 - protein, 7 aa, Homo Sapien
SEVDMLK

SEQ ID NO: 5898 - protein, 8 aa, Homo Sapien
SFAVGMFK

SEQ ID NO: 5899 - protein, 25 aa, Homo Sapien
SFGTTVSPWVVPMDALMPFAVPNPK

SEQ ID NO: 5900 - protein, 18 aa, Homo Sapien
SFKDTPLEGLEQLLPELK

SEQ ID NO: 5901 - protein, 12 aa, Homo Sapien
SFLLDLLNATGK

SEQ ID NO: 5902 - protein, 9 aa, Homo Sapien
SFNLSALEK

SEQ ID NO: 5903 - protein, 12 aa, Homo Sapien
SFTPVFLGSALK

SEQ ID NO: 5904 - protein, 19 aa, Homo Sapien
SGAWDESGVFIYTTSNHIK

SEQ ID NO: 5905 - protein, 15 aa, Homo Sapien
SGDAAIVEMVPGKPM

SEQ ID NO: 5906 - protein, 11 aa, Homo Sapien
SGDLYVLAADK

SEQ ID NO: 5907 - protein, 10 aa, Homo Sapien
SGDWKGYTGK

SEQ ID NO: 5908 - protein, 10 aa, Homo Sapien
SGEPQTFTLK

SEQ ID NO: 5909 - protein, 9 aa, Homo Sapien
SGEVLVNVK

SEQ ID NO: 5910 - protein, 10 aa, Homo Sapien
SGFSLGSDGK

SEQ ID NO: 5911 - protein, 9 aa, Homo Sapien
SGHFEQAIK

SEQ ID NO: 5912 - protein, 21 aa, Homo Sapien
SGILAAESIFNQLTSENLQSK

SEQ ID NO: 5913 - protein, 16 aa, Homo Sapien
SGIPIVTSPYQIHFTK

SEQ ID NO: 5914 - protein, 14 aa, Homo Sapien
SGPEAPEWYQVELK

SEQ ID NO: 5915 - protein, 11 aa, Homo Sapien
SGQVLEVSGSK

SEQ ID NO: 5916 - protein, 29 aa, Homo Sapien
SGTIFDNFLITNDEAYAEEFGNETWGVTK

SEQ ID NO: 5917 - protein, 9 aa, Homo Sapien
SGTSEFLNK

SEQ ID NO: 5918 - protein, 9 aa, Homo Sapien
SGVSLAALK

SEQ ID NO: 5919 - protein, 10 aa, Homo Sapien
SGVSLAALKK

SEQ ID NO: 5920 - protein, 8 aa, Homo Sapien
SGYLAGDK

SEQ ID NO: 5921 - protein, 9 aa, Homo Sapien
SGYLLPDTK

SEQ ID NO: 5922 - protein, 10 aa, Homo Sapien
SHSIFLINVK

SEQ ID NO: 5923 - protein, 11 aa, Homo Sapien
SIAAATSALVK

SEQ ID NO: 5924 - protein, 12 aa, Homo Sapien
SIATLAITTLLK

SEQ ID NO: 5925 - protein, 20 aa, Homo Sapien
SIEELQDWDGQSPATVSHQK

SEQ ID NO: 5926 - protein, 14 aa, Homo Sapien
SILLSVPLLVVDNK

SEQ ID NO: 5927 - protein, 23 aa, Homo Sapien
SINPDEAVAYGAAVQAAILMGDK

SEQ ID NO: 5928 - protein, 23 aa, Homo Sapien
SINPDEAVAYGAAVQAAILSGDK

SEQ ID NO: 5929 - protein, 12 aa, Homo Sapien
SISITSALLTEK

SEQ ID NO: 5930 - protein, 11 aa, Homo Sapien
SKAEEVVSFVK

SEQ ID NO: 5931 - protein, 18 aa, Homo Sapien
SKLEQQVEDLESSLEQEK

SEQ ID NO: 5932 - protein, 13 aa, Homo Sapien
SKLSQNNFALGYK

SEQ ID NO: 5933 - protein, 16 aa, Homo Sapien
SKVDEAVAVLQAHHAK

SEQ ID NO: 5934 - protein, 13 aa, Homo Sapien
SLDFTELDVAAEK

SEQ ID NO: 5935 - protein, 8 aa, Homo Sapien
SLDLVTMK

SEQ ID NO: 5936 - protein, 8 aa, Homo Sapien
SLEAQADK

SEQ ID NO: 5937 - protein, 10 aa, Homo Sapien
SLEEDLETLK

SEQ ID NO: 5938 - protein, 11 aa, Homo Sapien
SLETEILESLK

SEQ ID NO: 5939 - protein, 13 aa, Homo Sapien
SLHSVVQTLESDK

SEQ ID NO: 5940 - protein, 15 aa, Homo Sapien
SLHSVVQTLESDKVK

SEQ ID NO: 5941 - protein, 10 aa, Homo Sapien
SLLQALNEVK

SEQ ID NO: 5942 - protein, 12 aa, Homo Sapien
SLLQAVANLPYK

SEQ ID NO: 5943 - protein, 23 aa, Homo Sapien
SLLVIPNTLAVNAAQDSTDLVAK

SEQ ID NO: 5944 - protein, 14 aa, Homo Sapien
SLLYSIGNGSVFGK

SEQ ID NO: 5945 - protein, 18 aa, Homo Sapien
SLNLEPDNVGVVVFGNDK

SEQ ID NO: 5946 - protein, 18 aa, Homo Sapien
SLSAQEEKITALDEFATK

SEQ ID NO: 5947 - protein, 23 aa, Homo Sapien
SLTHTQAASLPYVALTAWSAINK

SEQ ID NO: 5948 - protein, 18 aa, Homo Sapien
SLVASLAEPDFVVTDFAK

SEQ ID NO: 5949 - protein, 12 aa, Homo Sapien
SLVQEMVGSFGK

SEQ ID NO: 5950 - protein, 12 aa, Homo Sapien
SLVQGELVTASK

SEQ ID NO: 5951 - protein, 19 aa, Homo Sapien
SMTEKEQQQLIDDHFLFDK

SEQ ID NO: 5952 - protein, 11 aa, Homo Sapien
SNAAAAALDKK

SEQ ID NO: 5953 - protein, 11 aa, Homo Sapien
SNFKPSLLAQK

SEQ ID NO: 5954 - protein, 18 aa, Homo Sapien
SNLAYDIVQLPTGLTGIK

SEQ ID NO: 5955 - protein, 15 aa, Homo Sapien
SNQQLENDLNLMDIK

SEQ ID NO: 5956 - protein, 9 aa, Homo Sapien
SPADKTNVK

SEQ ID NO: 5957 - protein, 16 aa, Homo Sapien
SPAHGISLFLVENGMK

SEQ ID NO: 5958 - protein, 14 aa, Homo Sapien
SPASDTYIVFGEAK

SEQ ID NO: 5959 - protein, 7 aa, Homo Sapien
SPDEWSK

SEQ ID NO: 5960 - protein, 13 aa, Homo Sapien
SPDVINGSPISQK

SEQ ID NO: 5961 - protein, 16 aa, Homo Sapien
SPFEVNVGMALGDANK

SEQ ID NO: 5962 - protein, 9 aa, Homo Sapien
SPFEVYVDK

SEQ ID NO: 5963 - protein, 15 aa, Homo Sapien
SPFSVAVSPSLDLSK

SEQ ID NO: 5964 - protein, 15 aa, Homo Sapien
SPFTVGVAAPLDLSK

SEQ ID NO: 5965 - protein, 12 aa, Homo Sapien
SPHEQEIKFFAK

SEQ ID NO: 5966 - protein, 17 aa, Homo Sapien
SPPNPDNIAPGYSGPLK

SEQ ID NO: 5967 - protein, 14 aa, Homo Sapien
SPSAQLMEQVAQLK

SEQ ID NO: 5968 - protein, 14 aa, Homo Sapien
SPVAKDVDLEFLAK

SEQ ID NO: 5969 - protein, 12 aa, Homo Sapien
SPYAGLQLGAAK

SEQ ID NO: 5970 - protein, 11 aa, Homo Sapien
SQDDVEAPSKK

SEQ ID NO: 5971 - protein, 9 aa, Homo Sapien
SQEGSQFVK

SEQ ID NO: 5972 - protein, 8 aa, Homo Sapien
SQQALVQK

SEQ ID NO: 5973 - protein, 17 aa, Homo Sapien
SQVFSTAADGQTQVEIK

SEQ ID NO: 5974 - protein, 7 aa, Homo Sapien
SQWLNEK

SEQ ID NO: 5975 - protein, 15 aa, Homo Sapien
SSALQWLTPEQTSGK

SEQ ID NO: 5976 - protein, 21 aa, Homo Sapien
SSATFQSTVAGSPPISITWLK

SEQ ID NO: 5977 - protein, 12 aa, Homo Sapien
SSDKFDIIADGK

SEQ ID NO: 5978 - protein, 14 aa, Homo Sapien
SSFYVNGLTLGGQK

SEQ ID NO: 5979 - protein, 26 aa, Homo Sapien
SSGTASSVAFTPLQGLEIVNPQAAEK

SEQ ID NO: 5980 - protein, 9 aa, Homo Sapien
SSILQAESK

SEQ ID NO: 5981 - protein, 16 aa, Homo Sapien
SSLPPVLGTESDATVK

SEQ ID NO: 5982 - protein, 9 aa, Homo Sapien
STFVLDEFK

SEQ ID NO: 5983 - protein, 17 aa, Homo Sapien
STGEAFVQFASQEIAEK

SEQ ID NO: 5984 - protein, 9 aa, Homo Sapien
STGSWSTLK

SEQ ID NO: 5985 - protein, 10 aa, Homo Sapien
STHETWAYGK

SEQ ID NO: 5986 - protein, 15 aa, Homo Sapien
STLLNILSGLSVPTK

SEQ ID NO: 5987 - protein, 11 aa, Homo Sapien
STLMDTLFNTK

SEQ ID NO: 5988 - protein, 12 aa, Homo Sapien
STLQTLPEIVAK

SEQ ID NO: 5989 - protein, 17 aa, Homo Sapien
SVGDGETVEFDVVEGEK

SEQ ID NO: 5990 - protein, 15 aa, Homo Sapien
SVILEAFSSPSEEVK

SEQ ID NO: 5991 - protein, 12 aa, Homo Sapien
SVLAETEGILQK

SEQ ID NO: 5992 - protein, 10 aa, Homo Sapien
SVLVSAGNVK

SEQ ID NO: 5993 - protein, 10 aa, Homo Sapien
SVPMVPPGIK

SEQ ID NO: 5994 - protein, 23 aa, Homo Sapien
SVPPSASHVAPTETFTYEWTVPK

SEQ ID NO: 5995 - protein, 17 aa, Homo Sapien
SVSDGIAALDLNAVANK

SEQ ID NO: 5996 - protein, 16 aa, Homo Sapien
SVTNEDVTQEELGGAK

SEQ ID NO: 5997 - protein, 13 aa, Homo Sapien
SVTTSNPSKFTAK

SEQ ID NO: 5998 - protein, 21 aa, Homo Sapien
SVVDSLDIESMTIEDEYSGPK

SEQ ID NO: 5999 - protein, 16 aa, Homo Sapien
SWIEEQAMGSFLSVAK

SEQ ID NO: 6000 - protein, 8 aa, Homo Sapien
SWLHNDLK

SEQ ID NO: 6001 - protein, 23 aa, Homo Sapien
SWVQFNSNSQLMYGLPDSSHVGK

SEQ ID NO: 6002 - protein, 12 aa, Homo Sapien
SYQFWDTQPVPK

SEQ ID NO: 6003 - protein, 13 aa, Homo Sapien
TAAVANSMNYLTK

SEQ ID NO: 6004 - protein, 10 aa, Homo Sapien
TAAYVNAIEK

SEQ ID NO: 6005 - protein, 18 aa, Homo Sapien
TAEALDKDGWLHTGDIGK

SEQ ID NO: 6006 - protein, 14 aa, Homo Sapien
TAEHEAAQQDLQSK

SEQ ID NO: 6007 - protein, 18 aa, Homo Sapien
TAFTDLPEQVPESISNQK

SEQ ID NO: 6008 - protein, 14 aa, Homo Sapien
TAGWNIPMGLLYNK

SEQ ID NO: 6009 - protein, 17 aa, Homo Sapien
TAGYPHVNVTNFTSSWK

SEQ ID NO: 6010 - protein, 14 aa, Homo Sapien
TAMNVNDLFLAIAK

SEQ ID NO: 6011 - protein, 15 aa, Homo Sapien
TAPYVVTGSVDQTVK

SEQ ID NO: 6012 - protein, 14 aa, Homo Sapien
TASNVEEAFINTAK

SEQ ID NO: 6013 - protein, 16 aa, Homo Sapien
TATDEAYKDPSNLQGK

SEQ ID NO: 6014 - protein, 12 aa, Homo Sapien
TAVDSLVAYSVK

SEQ ID NO: 6015 - protein, 10 aa, Homo Sapien
TAYGPNGMNK

SEQ ID NO: 6016 - protein, 14 aa, Homo Sapien
TDFFIGGEEGMAEK

SEQ ID NO: 6017 - protein, 42 aa, Homo Sapien
TDGEGALSEPSATVTIEELAAPPPPVLMHHGESSQVLHPGNK

SEQ ID NO: 6018 - protein, 10 aa, Homo Sapien
TDLLLEPYNK

SEQ ID NO: 6019 - protein, 12 aa, Homo Sapien
TDLVPAFQNLMK

SEQ ID NO: 6020 - protein, 15 aa, Homo Sapien
TDNYINGEYFATIIK

SEQ ID NO: 6021 - protein, 8 aa, Homo Sapien
TEAPLNPK

SEQ ID NO: 6022 - protein, 7 aa, Homo Sapien
TEEVVVK

SEQ ID NO: 6023 - protein, 16 aa, Homo Sapien
TEFLSFMNTELAAFTK

SEQ ID NO: 6024 - protein, 11 aa, Homo Sapien
TEFSIIHYAGK

SEQ ID NO: 6025 - protein, 13 aa, Homo Sapien
TEGDGVYTLNNEK

SEQ ID NO: 6026 - protein, 15 aa, Homo Sapien
TEGLSVLSQAMAVIK

SEQ ID NO: 6027 - protein, 14 aa, Homo Sapien
TEHPFTVEEFVLPK

SEQ ID NO: 6028 - protein, 15 aa, Homo Sapien
TEMEDLMSSKDDVGK

SEQ ID NO: 6029 - protein, 11 aa, Homo Sapien
TEQDKTPLQQK

SEQ ID NO: 6030 - protein, 11 aa, Homo Sapien
TETLASLEDTK

SEQ ID NO: 6031 - protein, 10 aa, Homo Sapien
TEVNSGFFYK

SEQ ID NO: 6032 - protein, 14 aa, Homo Sapien
TEVSSNHVLIYLDK

SEQ ID NO: 6033 - protein, 13 aa, Homo Sapien
TEWLDGKHVVFGK

SEQ ID NO: 6034 - protein, 14 aa, Homo Sapien
TFAPEEISAMVLTK

SEQ ID NO: 6035 - protein, 10 aa, Homo Sapien
TFESLVDFSK

SEQ ID NO: 6036 - protein, 13 aa, Homo Sapien
TFFSFPAVVAPFK

SEQ ID NO: 6037 - protein, 13 aa, Homo Sapien
TFGENYVQELLEK

SEQ ID NO: 6038 - protein, 15 aa, Homo Sapien
TFSVWYVPEVTGTHK

SEQ ID NO: 6039 - protein, 10 aa, Homo Sapien
TFSWASVTSK

SEQ ID NO: 6040 - protein, 7 aa, Homo Sapien
TGEGFYK

SEQ ID NO: 6041 - protein, 14 aa, Homo Sapien
TGENVEDAFLEAAK

SEQ ID NO: 6042 - protein, 9 aa, Homo Sapien
TGFQAVTGK

SEQ ID NO: 6043 - protein, 15 aa, Homo Sapien
TGFSTSPESPYTHWK

SEQ ID NO: 6044 - protein, 8 aa, Homo Sapien
TGIGVQLK

SEQ ID NO: 6045 - protein, 13 aa, Homo Sapien
TGLYNYYDDEKEK

SEQ ID NO: 6046 - protein, 30 aa, Homo Sapien
TGPAATTLPDGAAAESLVESSEVAVIGFFK

SEQ ID NO: 6047 - protein, 20 aa, Homo Sapien
TGPAAVFALEGALGGVMDDK

SEQ ID NO: 6048 - protein, 41 aa, Homo Sapien
TGPVASTVSAFSVLSSGPGLPPPPPPLPPPGPPPLFENEGK

SEQ ID NO: 6049 - protein, 12 aa, Homo Sapien
TGQAAELGGLLK

SEQ ID NO: 6050 - protein, 18 aa, Homo Sapien
TGQEVVFVAEPDNKNVYK

SEQ ID NO: 6051 - protein, 11 aa, Homo Sapien
TGTETVFEKPK

SEQ ID NO: 6052 - protein, 13 aa, Homo Sapien
TGTLEFMAPEMVK

SEQ ID NO: 6053 - protein, 20 aa, Homo Sapien
TGVTGEQIWLQINEPTPNDK

SEQ ID NO: 6054 - protein, 10 aa, Homo Sapien
TGYKDPYSGK

SEQ ID NO: 6055 - protein, 12 aa, Homo Sapien
THLSLSHNPEQK

SEQ ID NO: 6056 - protein, 13 aa, Homo Sapien
THSQGGYGSQGYK

SEQ ID NO: 6057 - protein, 7 aa, Homo Sapien
THYIVEK

SEQ ID NO: 6058 - protein, 10 aa, Homo Sapien
TIAQDYGVLK

SEQ ID NO: 6059 - protein, 8 aa, Homo Sapien
TIDEVVEK

SEQ ID NO: 6060 - protein, 11 aa, Homo Sapien
TIDQLHLEFAK

SEQ ID NO: 6061 - protein, 10 aa, Homo Sapien
TISHVIIGLK

SEQ ID NO: 6062 - protein, 13 aa, Homo Sapien
TIVITSHPGQIVK

SEQ ID NO: 6063 - protein, 10 aa, Homo Sapien
TKDIEDVFYK

SEQ ID NO: 6064 - protein, 7 aa, Homo Sapien
TKEILLK

SEQ ID NO: 6065 - protein, 7 aa, Homo Sapien
TKELLIK

SEQ ID NO: 6066 - protein, 11 aa, Homo Sapien
TKEQILEEFSK

SEQ ID NO: 6067 - protein, 15 aa, Homo Sapien
TKPYIQVDIGGGQTK

SEQ ID NO: 6068 - protein, 10 aa, Homo Sapien
TKTEIVVESK

SEQ ID NO: 6069 - protein, 13 aa, Homo Sapien
TLADLTLLDSPIK

SEQ ID NO: 6070 - protein, 11 aa, Homo Sapien
TLAGAVSDLLK

SEQ ID NO: 6071 - protein, 20 aa, Homo Sapien
TLASLFSTYASAEADSSAKK

SEQ ID NO: 6072 - protein, 12 aa, Homo Sapien
TLATDILMGVLK

SEQ ID NO: 6073 - protein, 16 aa, Homo Sapien
TLAVNAAQDSTDLVAK

SEQ ID NO: 6074 - protein, 7 aa, Homo Sapien
TLDGFKK

SEQ ID NO: 6075 - protein, 11 aa, Homo Sapien
TLEEAVGNIVK

SEQ ID NO: 6076 - protein, 10 aa, Homo Sapien
TLEEEVTVVK

SEQ ID NO: 6077 - protein, 16 aa, Homo Sapien
TLFSNIVLSGGSTLFK

SEQ ID NO: 6078 - protein, 9 aa, Homo Sapien
TLLAQANSK

SEQ ID NO: 6079 - protein, 10 aa, Homo Sapien
TLLDTEDKLK

SEQ ID NO: 6080 - protein, 8 aa, Homo Sapien
TLLFSGQK

SEQ ID NO: 6081 - protein, 12 aa, Homo Sapien
TLMALGSLAVTK

SEQ ID NO: 6082 - protein, 24 aa, Homo Sapien
TLNQPDSQLQLTTGNGLFLSEGLK

SEQ ID NO: 6083 - protein, 17 aa, Homo Sapien
TLPFYKDYFNVPYPLPK

SEQ ID NO: 6084 - protein, 11 aa, Homo Sapien
TLQALQIPAAK

SEQ ID NO: 6085 - protein, 10 aa, Homo Sapien
TLQIFNIEMK

SEQ ID NO: 6086 - protein, 18 aa, Homo Sapien
TLQQQTFKIDIDPEETVK

SEQ ID NO: 6087 - protein, 22 aa, Homo Sapien
TLTAVHDAILEDLVFPSEIVGK

SEQ ID NO: 6088 - protein, 22 aa, Homo Sapien
TLVLSNLSYSATEETLQEVFEK

SEQ ID NO: 6089 - protein, 8 aa, Homo Sapien
TLVPELIK

SEQ ID NO: 6090 - protein, 13 aa, Homo Sapien
TLVVHEKADDLGK

SEQ ID NO: 6091 - protein, 13 aa, Homo Sapien
TLYNNQPIDFLKK

SEQ ID NO: 6092 - protein, 28 aa, Homo Sapien
TMLEDLGMDDEGDDDPVPLPNVNAAILK

SEQ ID NO: 6093 - protein, 29 aa, Homo Sapien
TMLEDLGMDDEGDDDPVPLPNVNAAILKK

SEQ ID NO: 6094 - protein, 16 aa, Homo Sapien
TMLELLNQLDGFEATK

SEQ ID NO: 6095 - protein, 14 aa, Homo Sapien
TMLHLTDIQLQDNK

SEQ ID NO: 6096 - protein, 24 aa, Homo Sapien
TNAVAHVDDMPNALSALSDLHAHK

SEQ ID NO: 6097 - protein, 13 aa, Homo Sapien
TNEQMHQLVAAYK

SEQ ID NO: 6098 - protein, 27 aa, Homo Sapien
TNISDEESEQATEMLVHNAQNLMQSVK

SEQ ID NO: 6099 - protein, 8 aa, Homo Sapien
TNLKDVIK

SEQ ID NO: 6100 - protein, 12 aa, Homo Sapien
TNMMMVGVHGPK

SEQ ID NO: 6101 - protein, 12 aa, Homo Sapien
TNQLNLQNTATK

SEQ ID NO: 6102 - protein, 25 aa, Homo Sapien
TNVGYNPSPGDEVPVQGVAITFEPK

SEQ ID NO: 6103 - protein, 9 aa, Homo Sapien
TPEASPEPK

SEQ ID NO: 6104 - protein, 10 aa, Homo Sapien
TPEEYPESAK

SEQ ID NO: 6105 - protein, 11 aa, Homo Sapien
TPFLLSGTSYK

SEQ ID NO: 6106 - protein, 16 aa, Homo Sapien
TPHAEDMAELVIVGGK

SEQ ID NO: 6107 - protein, 17 aa, Homo Sapien
TPVGFIGLGNMGNPMAK

SEQ ID NO: 6108 - protein, 23 aa, Homo Sapien
TPVKEPNSENVDISSGGGVTGWK

SEQ ID NO: 6109 - protein, 13 aa, Homo Sapien
TPVQPNPIVYMMK

SEQ ID NO: 6110 - protein, 31 aa, Homo Sapien
TPYHVNLLLAGYDEHEGPALYYMDYLAALAK

SEQ ID NO: 6111 - protein, 16 aa, Homo Sapien
TQGFLALFSGDTGEIK

SEQ ID NO: 6112 - protein, 12 aa, Homo Sapien
TQILAASYELHK

SEQ ID NO: 6113 - protein, 7 aa, Homo Sapien
TQLPQQK

SEQ ID NO: 6114 - protein, 8 aa, Homo Sapien
TQLVSNLK

SEQ ID NO: 6115 - protein, 8 aa, Homo Sapien
TQNVLGEK

SEQ ID NO: 6116 - protein, 10 aa, Homo Sapien
TQPILDILLK

SEQ ID NO: 6117 - protein, 19 aa, Homo Sapien
TQTAIASEDMPNTLTEAEK

SEQ ID NO: 6118 - protein, 12 aa, Homo Sapien
TSDLIVLGLPWK

SEQ ID NO: 6119 - protein, 11 aa, Homo Sapien
TSDQIHFFFAK

SEQ ID NO: 6120 - protein, 11 aa, Homo Sapien
TSDVGGYYYEK

SEQ ID NO: 6121 - protein, 28 aa, Homo Sapien
TSESGELHGLTTEEEFVEGIYKVEIDTK

SEQ ID NO: 6122 - protein, 11 aa, Homo Sapien
TSFHALTSILK

SEQ ID NO: 6123 - protein, 12 aa, Homo Sapien
TSKAEELLAEEK

SEQ ID NO: 6124 - protein, 11 aa, Homo Sapien
TSMESLIHHFK

SEQ ID NO: 6125 - protein, 16 aa, Homo Sapien
TSPVEGLSGNPADLEK

SEQ ID NO: 6126 - protein, 15 aa, Homo Sapien
TSQTVATFLDELAQK

SEQ ID NO: 6127 - protein, 18 aa, Homo Sapien
TSSAQVEGGVHSLHSYEK

SEQ ID NO: 6128 - protein, 19 aa, Homo Sapien
TSTILGDITSIPELADYIK

SEQ ID NO: 6129 - protein, 18 aa, Homo Sapien
TSTSAVPNLFVPLNTNPK

SEQ ID NO: 6130 - protein, 13 aa, Homo Sapien
TTETQVLVASAQK

SEQ ID NO: 6131 - protein, 15 aa, Homo Sapien
TTIEAIHGLMSQVIK

SEQ ID NO: 6132 - protein, 11 aa, Homo Sapien
TTVGVDGSLYK

SEQ ID NO: 6133 - protein, 11 aa, Homo Sapien
TVAHLQTVQHK

SEQ ID NO: 6134 - protein, 18 aa, Homo Sapien
TVDFTQDSNYLLTGGQDK

SEQ ID NO: 6135 - protein, 13 aa, Homo Sapien
TVDNFVALATGEK

SEQ ID NO: 6136 - protein, 7 aa, Homo Sapien
TVEALYK

SEQ ID NO: 6137 - protein, 16 aa, Homo Sapien
TVEGAGSIAAATGFVK

SEQ ID NO: 6138 - protein, 10 aa, Homo Sapien
TVEVDLHTAK

SEQ ID NO: 6139 - protein, 10 aa, Homo Sapien
TVGLFLQGGK

SEQ ID NO: 6140 - protein, 9 aa, Homo Sapien
TVITNEYMK

SEQ ID NO: 6141 - protein, 15 aa, Homo Sapien
TVITNEYMKEDFLIK

SEQ ID NO: 6142 - protein, 28 aa, Homo Sapien
TVLLSIQALLSAPNPDDPLANDVAEQWK

SEQ ID NO: 6143 - protein, 12 aa, Homo Sapien
TVNFGDTEEAKK

SEQ ID NO: 6144 - protein, 16 aa, Homo Sapien
TVSGVNGPLVILDHVK

SEQ ID NO: 6145 - protein, 14 aa, Homo Sapien
TVSKVDDFLANEAK

SEQ ID NO: 6146 - protein, 28 aa, Homo Sapien
TVSLGAGAKDELHIVEAEAMNYEGSPIK

SEQ ID NO: 6147 - protein, 14 aa, Homo Sapien
TWGLQATNAVSPLK

SEQ ID NO: 6148 - protein, 10 aa, Homo Sapien
TYGVSFFLVK

SEQ ID NO: 6149 - protein, 27 aa, Homo Sapien
TYMLAFDVNDEKNWGLSVYADKPETTK

SEQ ID NO: 6150 - protein, 21 aa, Homo Sapien
TYNTDVPLVLMNSFNTDEDTK

SEQ ID NO: 6151 - protein, 8 aa, Homo Sapien
VAAGLQIK

SEQ ID NO: 6152 - protein, 10 aa, Homo Sapien
VADISGDTQK

SEQ ID NO: 6153 - protein, 13 aa, Homo Sapien
VADKDYSVTANSK

SEQ ID NO: 6154 - protein, 12 aa, Homo Sapien
VAEELALEQAKK

SEQ ID NO: 6155 - protein, 10 aa, Homo Sapien
VAEGQTLDLK

SEQ ID NO: 6156 - protein, 28 aa, Homo Sapien
VAEGTQVLELPFKGDDITMVLILPKPEK

SEQ ID NO: 6157 - protein, 11 aa, Homo Sapien
VAEIEHAEKEK

SEQ ID NO: 6158 - protein, 16 aa, Homo Sapien
VAGAVTELIQAAEAMK

SEQ ID NO: 6159 - protein, 16 aa, Homo Sapien
VAGDQNVEYKGTVWHK

SEQ ID NO: 6160 - protein, 9 aa, Homo Sapien
VAIIITDGK

SEQ ID NO: 6161 - protein, 11 aa, Homo Sapien
VAIVGGSGSGK

SEQ ID NO: 6162 - protein, 20 aa, Homo Sapien
VALDFENEMATAASSSSLEK

SEQ ID NO: 6163 - protein, 18 aa, Homo Sapien
VAPEEHPTLLTEAPLNPK

SEQ ID NO: 6164 - protein, 12 aa, Homo Sapien
VAQGVSGAVQDK

SEQ ID NO: 6165 - protein, 25 aa, Homo Sapien
VATAQDDITGDGTTSNVLIIGELLK

SEQ ID NO: 6166 - protein, 13 aa, Homo Sapien
VAVEAKNPADLPK

SEQ ID NO: 6167 - protein, 11 aa, Homo Sapien
VAVFFGGLSIK

SEQ ID NO: 6168 - protein, 12 aa, Homo Sapien
VAVVAGYGDVGK

SEQ ID NO: 6169 - protein, 10 aa, Homo Sapien
VDDFLANEAK

SEQ ID NO: 6170 - protein, 10 aa, Homo Sapien
VDDQIAIVFK

SEQ ID NO: 6171 - protein, 14 aa, Homo Sapien
VDDSSEDKTEFTVK

SEQ ID NO: 6172 - protein, 16 aa, Homo Sapien
VDEFVTHNLSFDEINK

SEQ ID NO: 6173 - protein, 13 aa, Homo Sapien
VDEIVVLSGDNSK

SEQ ID NO: 6174 - protein, 12 aa, Homo Sapien
VDELTTDLEILK

SEQ ID NO: 6175 - protein, 8 aa, Homo Sapien
VDGVVLEK

SEQ ID NO: 6176 - protein, 16 aa, Homo Sapien
VDIDVPDVNLEAPEGK

SEQ ID NO: 6177 - protein, 16 aa, Homo Sapien
VDIEGPDVNIEGPEGK

SEQ ID NO: 6178 - protein, 18 aa, Homo Sapien
VDINAPDVDVQGPDWHLK

SEQ ID NO: 6179 - protein, 18 aa, Homo Sapien
VDISAPDVDVHGPDWHLK

SEQ ID NO: 6180 - protein, 27 aa, Homo Sapien
VDITYDGHPVPGSPFAVEGVLPPDPSK

SEQ ID NO: 6181 - protein, 28 aa, Homo Sapien
VDIVAINDPFIDLNYMVYMFQYDSTHGK

SEQ ID NO: 6182 - protein, 10 aa, Homo Sapien
VDLSTSTDWK

SEQ ID NO: 6183 - protein, 13 aa, Homo Sapien
VDLSTSTDWKEAK

SEQ ID NO: 6184 - protein, 19 aa, Homo Sapien
VDQIIMAKPAGGPKPPSGK

SEQ ID NO: 6185 - protein, 16 aa, Homo Sapien
VDQIQEIVTGNPTVIK

SEQ ID NO: 6186 - protein, 11 aa, Homo Sapien
VDSFHESTEGK

SEQ ID NO: 6187 - protein, 16 aa, Homo Sapien
VDTNAPDLSLEGPEGK

SEQ ID NO: 6188 - protein, 12 aa, Homo Sapien
VDVGKDQEFTVK

SEQ ID NO: 6189 - protein, 26 aa, Homo Sapien
VDYIMQLPVPMDAALNKEELLEYEEK

SEQ ID NO: 6190 - protein, 17 aa, Homo Sapien
VEAGDVIYIEANSGAVK

SEQ ID NO: 6191 - protein, 7 aa, Homo Sapien
VEAILEK

SEQ ID NO: 6192 - protein, 11 aa, Homo Sapien
VEAQLQELQVK

SEQ ID NO: 6193 - protein, 10 aa, Homo Sapien
VEAQVYILSK

SEQ ID NO: 6194 - protein, 17 aa, Homo Sapien
VEAVNMAEGIIHDTETK

SEQ ID NO: 6195 - protein, 12 aa, Homo Sapien
VEEDVASDLVMK

SEQ ID NO: 6196 - protein, 12 aa, Homo Sapien
VEESSWLIEDGK

SEQ ID NO: 6197 - protein, 11 aa, Homo Sapien
VEFSLTDYGSK

SEQ ID NO: 6198 - protein, 13 aa, Homo Sapien
VEGDLKGPEIDVK

SEQ ID NO: 6199 - protein, 13 aa, Homo Sapien
VEGDLKGPEVDIK

SEQ ID NO: 6200 - protein, 13 aa, Homo Sapien
VEGDLKGPEVDLK

SEQ ID NO: 6201 - protein, 15 aa, Homo Sapien
VEGFPTIYFAPSGDK

SEQ ID NO: 6202 - protein, 16 aa, Homo Sapien
VEGLMTTVHAITATQK

SEQ ID NO: 6203 - protein, 23 aa, Homo Sapien
VELNALMTDETISNVPILILGNK

SEQ ID NO: 6204 - protein, 10 aa, Homo Sapien
VETTEDLVAK

SEQ ID NO: 6205 - protein, 10 aa, Homo Sapien
VEVTEFEDIK

SEQ ID NO: 6206 - protein, 14 aa, Homo Sapien
VEYSEEELKTHISK

SEQ ID NO: 6207 - protein, 13 aa, Homo Sapien
VFITDDFHDMMPK

SEQ ID NO: 6208 - protein, 18 aa, Homo Sapien
VGAEGQDFPVQVEEVAAK

SEQ ID NO: 6209 - protein, 11 aa, Homo Sapien
VGDDPAVWQLK

SEQ ID NO: 6210 - protein, 14 aa, Homo Sapien
VGDKVLLPEYGGTK

SEQ ID NO: 6211 - protein, 19 aa, Homo Sapien
VGDPAEDFGTFFSAVIDAK

SEQ ID NO: 6212 - protein, 11 aa, Homo Sapien
VGEFSGANKEK

SEQ ID NO: 6213 - protein, 24 aa, Homo Sapien
VGFYVNTFQSIAGLEENFHKEMSK

SEQ ID NO: 6214 - protein, 11 aa, Homo Sapien
VGGSGVNVNAK

SEQ ID NO: 6215 - protein, 16 aa, Homo Sapien
VGIDTPDIDIHGPEGK

SEQ ID NO: 6216 - protein, 14 aa, Homo Sapien
VGKEDSSSTEFVEK

SEQ ID NO: 6217 - protein, 15 aa, Homo Sapien
VGKETVQTTEDQILK

SEQ ID NO: 6218 - protein, 16 aa, Homo Sapien
VGLGLGYLELPQINYK

SEQ ID NO: 6219 - protein, 11 aa, Homo Sapien
VGSTSENITQK

SEQ ID NO: 6220 - protein, 14 aa, Homo Sapien
VGVDPLIIPTDYWK

SEQ ID NO: 6221 - protein, 10 aa, Homo Sapien
VHAYIISSLK

SEQ ID NO: 6222 - protein, 16 aa, Homo Sapien
VHGPGIQSGTTNKPNK

SEQ ID NO: 6223 - protein, 8 aa, Homo Sapien
VHIVVTSK

SEQ ID NO: 6224 - protein, 8 aa, Homo Sapien
VHVIFNYK

SEQ ID NO: 6225 - protein, 16 aa, Homo Sapien
VIAPVDEVQISILSSK

SEQ ID NO: 6226 - protein, 20 aa, Homo Sapien
VIHVVTSEMDNYEPGVYTEK

SEQ ID NO: 6227 - protein, 11 aa, Homo Sapien
VIILGDSGVGK

SEQ ID NO: 6228 - protein, 13 aa, Homo Sapien
VIMVTGDHPITAK

SEQ ID NO: 6229 - protein, 16 aa, Homo Sapien
VINEPTAAALAYGLDK

SEQ ID NO: 6230 - protein, 20 aa, Homo Sapien
VINEPTAAALAYGLDKSEDK

SEQ ID NO: 6231 - protein, 9 aa, Homo Sapien
VINYEEFKK

SEQ ID NO: 6232 - protein, 8 aa, Homo Sapien
VIPELNGK

SEQ ID NO: 6233 - protein, 14 aa, Homo Sapien
VIQQSLEQEEAEHK

SEQ ID NO: 6234 - protein, 13 aa, Homo Sapien
VIQYLAYVASSHK

SEQ ID NO: 6235 - protein, 12 aa, Homo Sapien
VIVDFSSPNIAK

SEQ ID NO: 6236 - protein, 11 aa, Homo Sapien
VKGDVDVSLPK

SEQ ID NO: 6237 - protein, 11 aa, Homo Sapien
VKNEELDAMMK

SEQ ID NO: 6238 - protein, 12 aa, Homo Sapien
VKQTQDHISSVK

SEQ ID NO: 6239 - protein, 13 aa, Homo Sapien
VLDDGELLVQQTK

SEQ ID NO: 6240 - protein, 16 aa, Homo Sapien
VLDFEHFLPMLQTVAK

SEQ ID NO: 6241 - protein, 8 aa, Homo Sapien
VLDLQQIK

SEQ ID NO: 6242 - protein, 10 aa, Homo Sapien
VLDNAIETEK

SEQ ID NO: 6243 - protein, 9 aa, Homo Sapien
VLDSGAPIK

SEQ ID NO: 6244 - protein, 9 aa, Homo Sapien
VLEALLPLK

SEQ ID NO: 6245 - protein, 8 aa, Homo Sapien
VLEDSDLK

SEQ ID NO: 6246 - protein, 9 aa, Homo Sapien
VLEDSDLKK

SEQ ID NO: 6247 - protein, 14 aa, Homo Sapien
VLELEGEKGEWGFK

SEQ ID NO: 6248 - protein, 11 aa, Homo Sapien
VLELVSITANK

SEQ ID NO: 6249 - protein, 7 aa, Homo Sapien
VLEPTLK

SEQ ID NO: 6250 - protein, 11 aa, Homo Sapien
VLGAEGTVFPK

SEQ ID NO: 6251 - protein, 16 aa, Homo Sapien
VLGAFSDGLAHLDNLK

SEQ ID NO: 6252 - protein, 14 aa, Homo Sapien
VLGEAMTGISQNAK

SEQ ID NO: 6253 - protein, 16 aa, Homo Sapien
VLGILAMIDEGETDWK

SEQ ID NO: 6254 - protein, 13 aa, Homo Sapien
VLGTAFDPFLGGK

SEQ ID NO: 6255 - protein, 11 aa, Homo Sapien
VLIVYAHQEPK

SEQ ID NO: 6256 - protein, 11 aa, Homo Sapien
VLLISDPTTDK

SEQ ID NO: 6257 - protein, 14 aa, Homo Sapien
VLNSYWVGEDSTYK

SEQ ID NO: 6258 - protein, 11 aa, Homo Sapien
VLSQQAASVVK

SEQ ID NO: 6259 - protein, 11 aa, Homo Sapien
VLTPEEQLADK

SEQ ID NO: 6260 - protein, 10 aa, Homo Sapien
VLTVINQTQK

SEQ ID NO: 6261 - protein, 12 aa, Homo Sapien
VLVQNAAGSQEK

SEQ ID NO: 6262 - protein, 11 aa, Homo Sapien
VLYNLEVLSSK

SEQ ID NO: 6263 - protein, 11 aa, Homo Sapien
VMDDFAAFVEK

SEQ ID NO: 6264 - protein, 7 aa, Homo Sapien
VMNLISK

SEQ ID NO: 6265 - protein, 13 aa, Homo Sapien
VMQVLNADAIVVK

SEQ ID NO: 6266 - protein, 11 aa, Homo Sapien
VMVTNVTSLLK

SEQ ID NO: 6267 - protein, 16 aa, Homo Sapien
VMYTPMAPGNYLISVK

SEQ ID NO: 6268 - protein, 20 aa, Homo Sapien
VNAGDQPGADLGPLITPQAK

SEQ ID NO: 6269 - protein, 9 aa, Homo Sapien
VNASASSLK

SEQ ID NO: 6270 - protein, 16 aa, Homo Sapien
VNEMIIGGGMAFTFLK

SEQ ID NO: 6271 - protein, 10 aa, Homo Sapien
VNEVNQFAAK

SEQ ID NO: 6272 - protein, 9 aa, Homo Sapien
VNILFDFVK

SEQ ID NO: 6273 - protein, 14 aa, Homo Sapien
VNLLSFTGSTQVGK

SEQ ID NO: 6274 - protein, 18 aa, Homo Sapien
VNPCIGGVILFHETLYQK

SEQ ID NO: 6275 - protein, 17 aa, Homo Sapien
VNVDIINFGEEEVNTEK

SEQ ID NO: 6276 - protein, 11 aa, Homo Sapien
VNVPGSQAQLK

SEQ ID NO: 6277 - protein, 11 aa, Homo Sapien
VNVQNFHTSWK

SEQ ID NO: 6278 - protein, 12 aa, Homo Sapien
VNVYHHLVETLK

SEQ ID NO: 6279 - protein, 16 aa, Homo Sapien
VNWEEEAASGLLTSLK

SEQ ID NO: 6280 - protein, 14 aa, Homo Sapien
VPDSTYEMIGGLDK

SEQ ID NO: 6281 - protein, 11 aa, Homo Sapien
VPINVHANPGK

SEQ ID NO: 6282 - protein, 12 aa, Homo Sapien
VPLEVQEADEAK

SEQ ID NO: 6283 - protein, 7 aa, Homo Sapien
VPLVIFK

SEQ ID NO: 6284 - protein, 22 aa, Homo Sapien
VPVAVQGEDTVQSLTQGDGVAK

SEQ ID NO: 6285 - protein, 11 aa, Homo Sapien
VPVHDVTDASK

SEQ ID NO: 6286 - protein, 10 aa, Homo Sapien
VPVIGGHAGK

SEQ ID NO: 6287 - protein, 11 aa, Homo Sapien
VQFELHYQEVK

SEQ ID NO: 6288 - protein, 15 aa, Homo Sapien
VQGLEQAVDNFEGKK

SEQ ID NO: 6289 - protein, 15 aa, Homo Sapien
VQLLHTQNTSLIHTK

SEQ ID NO: 6290 - protein, 11 aa, Homo Sapien
VQLSGPQEAEK

SEQ ID NO: 6291 - protein, 12 aa, Homo Sapien
VQMQEDDIQLLK

SEQ ID NO: 6292 - protein, 13 aa, Homo Sapien
VQPIYGGTNEIMK

SEQ ID NO: 6293 - protein, 7 aa, Homo Sapien
VQQLVPK

SEQ ID NO: 6294 - protein, 11 aa, Homo Sapien
VQTLSNQPLLK

SEQ ID NO: 6295 - protein, 10 aa, Homo Sapien
VQVEYKGETK

SEQ ID NO: 6296 - protein, 10 aa, Homo Sapien
VQVSYKGETK

SEQ ID NO: 6297 - protein, 11 aa, Homo Sapien
VSAENIVGIGK

SEQ ID NO: 6298 - protein, 13 aa, Homo Sapien
VSASPLLYTLIEK

SEQ ID NO: 6299 - protein, 9 aa, Homo Sapien
VSAVNHYGK

SEQ ID NO: 6300 - protein, 13 aa, Homo Sapien
VSEWEVIQESGTK

SEQ ID NO: 6301 - protein, 9 aa, Homo Sapien
VSGSELVQK

SEQ ID NO: 6302 - protein, 9 aa, Homo Sapien
VSILESLDK

SEQ ID NO: 6303 - protein, 12 aa, Homo Sapien
VSLESVEGVWMK

SEQ ID NO: 6304 - protein, 13 aa, Homo Sapien
VSLVLSALQAGNK

SEQ ID NO: 6305 - protein, 9 aa, Homo Sapien
VSQLDIQIK

SEQ ID NO: 6306 - protein, 21 aa, Homo Sapien
VSQMAQYFEPLTLAAVGAASK

SEQ ID NO: 6307 - protein, 9 aa, Homo Sapien
VSSDVIDQK

SEQ ID NO: 6308 - protein, 13 aa, Homo Sapien
VSSVPNTSQSYAK

SEQ ID NO: 6309 - protein, 18 aa, Homo Sapien
VSVPSNLSYGEWLHGFEK

SEQ ID NO: 6310 - protein, 16 aa, Homo Sapien
VSYFPTVPGVYIVSTK

SEQ ID NO: 6311 - protein, 9 aa, Homo Sapien
VTADISLAK

SEQ ID NO: 6312 - protein, 9 aa, Homo Sapien
VTADLSLAK

SEQ ID NO: 6313 - protein, 11 aa, Homo Sapien
VTAPDVDLHLK

SEQ ID NO: 6314 - protein, 19 aa, Homo Sapien
VTEQLIEAINNGDFEAYTK

SEQ ID NO: 6315 - protein, 19 aa, Homo Sapien
VTEQLIEAISNGDFESYTK

SEQ ID NO: 6316 - protein, 12 aa, Homo Sapien
VTFMSAVSSQEK

SEQ ID NO: 6317 - protein, 21 aa, Homo Sapien
VTGEADVEFATHEDAVAAMSK

SEQ ID NO: 6318 - protein, 9 aa, Homo Sapien
VTGYIVEYK

SEQ ID NO: 6319 - protein, 10 aa, Homo Sapien
VTIEYYSQLK

SEQ ID NO: 6320 - protein, 9 aa, Homo Sapien
VTLLNAPTK

SEQ ID NO: 6321 - protein, 8 aa, Homo Sapien
VTTEQYQK

SEQ ID NO: 6322 - protein, 12 aa, Homo Sapien
VTVLFAGQHIAK

SEQ ID NO: 6323 - protein, 14 aa, Homo Sapien
VTVVLGAQWGDEGK

SEQ ID NO: 6324 - protein, 16 aa, Homo Sapien
VTVVLGAQWGDEGKGK

SEQ ID NO: 6325 - protein, 14 aa, Homo Sapien
VTWHPLSADEGLHK

SEQ ID NO: 6326 - protein, 16 aa, Homo Sapien
VTYTPMAPGSYLISIK

SEQ ID NO: 6327 - protein, 9 aa, Homo Sapien
VVDQEKVDK

SEQ ID NO: 6328 - protein, 23 aa, Homo Sapien
VVGFHVLGPNAGEVTQGFAAALK

SEQ ID NO: 6329 - protein, 9 aa, Homo Sapien
VVGSELIQK

SEQ ID NO: 6330 - protein, 11 aa, Homo Sapien
VVIFQQEQENK

SEQ ID NO: 6331 - protein, 8 aa, Homo Sapien
VVITPEIK

SEQ ID NO: 6332 - protein, 10 aa, Homo Sapien
VVNIVPVIAK

SEQ ID NO: 6333 - protein, 10 aa, Homo Sapien
VVPEMTEILK

SEQ ID NO: 6334 - protein, 23 aa, Homo Sapien
VVQGKEPAHLMSLFGGKPMIIYK

SEQ ID NO: 6335 - protein, 24 aa, Homo Sapien
VVSMDENFHPLNELIPLVYIQDPK

SEQ ID NO: 6336 - protein, 8 aa, Homo Sapien
VVSSIEQK

SEQ ID NO: 6337 - protein, 14 aa, Homo Sapien
VVSSVLQLGNIVFK

SEQ ID NO: 6338 - protein, 16 aa, Homo Sapien
VVSVLTVVHQDWLNGK

SEQ ID NO: 6339 - protein, 19 aa, Homo Sapien
VVSVLTVVHQDWLNGKEYK

SEQ ID NO: 6340 - protein, 14 aa, Homo Sapien
VVTYGMANLLTGPK

SEQ ID NO: 6341 - protein, 11 aa, Homo Sapien
VVVEQLNLLVK

SEQ ID NO: 6342 - protein, 13 aa, Homo Sapien
VVVPHDVGLTILK

SEQ ID NO: 6343 - protein, 18 aa, Homo Sapien
VWQLGSSSPNFTLEGHEK

SEQ ID NO: 6344 - protein, 14 aa, Homo Sapien
VYALPEDLVEVKPK

SEQ ID NO: 6345 - protein, 14 aa, Homo Sapien
VYALPEDLVEVNPK

SEQ ID NO: 6346 - protein, 14 aa, Homo Sapien
VYEIQDIYENSWTK

SEQ ID NO: 6347 - protein, 11 aa, Homo Sapien
VYGALMWALGK

SEQ ID NO: 6348 - protein, 8 aa, Homo Sapien
VYGPGVEK

SEQ ID NO: 6349 - protein, 28 aa, Homo Sapien
VYGSFLVNPESGYNVSLLYDLENLPASK

SEQ ID NO: 6350 - protein, 7 aa, Homo Sapien
VYTPVGK

SEQ ID NO: 6351 - protein, 10 aa, Homo Sapien
WDTGENPIYK

SEQ ID NO: 6352 - protein, 17 aa, Homo Sapien
WFLLEQPEIQVAHFPFK

SEQ ID NO: 6353 - protein, 16 aa, Homo Sapien
WIQDEIEFGYIEAPHK

SEQ ID NO: 6354 - protein, 15 aa, Homo Sapien
WLDLKDNPLDPVLAK

SEQ ID NO: 6355 - protein, 8 aa, Homo Sapien
WLLDFASK

SEQ ID NO: 6356 - protein, 8 aa, Homo Sapien
WLLELSKK

SEQ ID NO: 6357 - protein, 9 aa, Homo Sapien
WLNENAVEK

SEQ ID NO: 6358 - protein, 8 aa, Homo Sapien
WPLYLSTK

SEQ ID NO: 6359 - protein, 20 aa, Homo Sapien
WSTDDVQINDISLQDYIAVK

SEQ ID NO: 6360 - protein, 8 aa, Homo Sapien
WTEYSVVK

SEQ ID NO: 6361 - protein, 13 aa, Homo Sapien
WVLIGSPLVGQPK

SEQ ID NO: 6362 - protein, 25 aa, Homo Sapien
YAELLVSQGVVNQPEYEEEISKYDK

SEQ ID NO: 6363 - protein, 11 aa, Homo Sapien
YAVLYQPLFDK

SEQ ID NO: 6364 - protein, 10 aa, Homo Sapien
YDEMVESMKK

SEQ ID NO: 6365 - protein, 13 aa, Homo Sapien
YDYNSGEELESYK

SEQ ID NO: 6366 - protein, 18 aa, Homo Sapien
YEAAGTLVTLSSAPTAIK

SEQ ID NO: 6367 - protein, 14 aa, Homo Sapien
YEDFKEEGSENAVK

SEQ ID NO: 6368 - protein, 11 aa, Homo Sapien
YEEEIKVLSDK

SEQ ID NO: 6369 - protein, 9 aa, Homo Sapien
YEGFFSLWK

SEQ ID NO: 6370 - protein, 11 aa, Homo Sapien
YEILTPNSIPK

SEQ ID NO: 6371 - protein, 13 aa, Homo Sapien
YEISSVPTFLFFK

SEQ ID NO: 6372 - protein, 9 aa, Homo Sapien
YEYQPFAGK

SEQ ID NO: 6373 - protein, 8 aa, Homo Sapien
YFDPANGK

SEQ ID NO: 6374 - protein, 20 aa, Homo Sapien
YFHVVIAGPQDSPFEGGTFK

SEQ ID NO: 6375 - protein, 16 aa, Homo Sapien
YGAATANYMEVVSLLK

SEQ ID NO: 6376 - protein, 10 aa, Homo Sapien
YGDFNKEVHK

SEQ ID NO: 6377 - protein, 12 aa, Homo Sapien
YGDLANWMIPGK

SEQ ID NO: 6378 - protein, 13 aa, Homo Sapien
YGEPGEVFINKGK

SEQ ID NO: 6379 - protein, 13 aa, Homo Sapien
YGGPYHIGGSPFK

SEQ ID NO: 6380 - protein, 12 aa, Homo Sapien
YGGQPVPNFPSK

SEQ ID NO: 6381 - protein, 35 aa, Homo Sapien
YGPQYGHPPPPPPPPEYGPHADSPVLMVYGLDQSK

SEQ ID NO: 6382 - protein, 14 aa, Homo Sapien
YGQEQWEEGDLYDK

SEQ ID NO: 6383 - protein, 14 aa, Homo Sapien
YGSETGQVTISVFK

SEQ ID NO: 6384 - protein, 8 aa, Homo Sapien
YGVGEGLK

SEQ ID NO: 6385 - protein, 10 aa, Homo Sapien
YGVSGYPTLK

SEQ ID NO: 6386 - protein, 24 aa, Homo Sapien
YIAENGTDPINNQPLSEEQLIDIK

SEQ ID NO: 6387 - protein, 12 aa, Homo Sapien
YIAIVSTTVETK

SEQ ID NO: 6388 - protein, 16 aa, Homo Sapien
YIAIVSTTVETKEPEK

SEQ ID NO: 6389 - protein, 10 aa, Homo Sapien
YIDDKDVFQK

SEQ ID NO: 6390 - protein, 8 aa, Homo Sapien
YIEIYVQK

SEQ ID NO: 6391 - protein, 10 aa, Homo Sapien
YIQESQALAK

SEQ ID NO: 6392 - protein, 12 aa, Homo Sapien
YKVEYYPVSGGK

SEQ ID NO: 6393 - protein, 12 aa, Homo Sapien
YLAPSGPSGTLK

SEQ ID NO: 6394 - protein, 14 aa, Homo Sapien
YLDFKVTEGSFVYK

SEQ ID NO: 6395 - protein, 16 aa, Homo Sapien
YLDQMEDLYEDFHIVK

SEQ ID NO: 6396 - protein, 13 aa, Homo Sapien
YLEANMTQSALPK

SEQ ID NO: 6397 - protein, 10 aa, Homo Sapien
YLEKPITMLL

SEQ ID NO: 6398 - protein, 9 aa, Homo Sapien
YLLDEYASK

SEQ ID NO: 6399 - protein, 12 aa, Homo Sapien
YLMEEDEDAYKK

SEQ ID NO: 6400 - protein, 25 aa, Homo Sapien
YLPPATQVVLISATLPHEILEMTNK

SEQ ID NO: 6401 - protein, 12 aa, Homo Sapien
YLQEIYNSNNQK

SEQ ID NO: 6402 - protein, 8 aa, Homo Sapien
YLQTYKDK

SEQ ID NO: 6403 - protein, 10 aa, Homo Sapien
YLVLANMLMK

SEQ ID NO: 6404 - protein, 19 aa, Homo Sapien
YMHSGPVVAMVWEGLNVVK

SEQ ID NO: 6405 - protein, 10 aa, Homo Sapien
YMPPEEGPYK

SEQ ID NO: 6406 - protein, 12 aa, Homo Sapien
YMVADKFTELQK

SEQ ID NO: 6407 - protein, 11 aa, Homo Sapien
YNALDLTNNGK

SEQ ID NO: 6408 - protein, 19 aa, Homo Sapien
YNEDLELEDAIHTAILTLK

SEQ ID NO: 6409 - protein, 10 aa, Homo Sapien
YNPKDSQLYK

SEQ ID NO: 6410 - protein, 14 aa, Homo Sapien
YNQPFFVTSLPDDK

SEQ ID NO: 6411 - protein, 12 aa, Homo Sapien
YPFILPHQQVDK

SEQ ID NO: 6412 - protein, 11 aa, Homo Sapien
YPGAYYIFQIK

SEQ ID NO: 6413 - protein, 16 aa, Homo Sapien
YPIEHGIITNWDDMEK

SEQ ID NO: 6414 - protein, 11 aa, Homo Sapien
YPLFEGQETGK

SEQ ID NO: 6415 - protein, 12 aa, Homo Sapien
YPLFEGQETGKK

SEQ ID NO: 6416 - protein, 19 aa, Homo Sapien
YPSLSLHGIEGAFSGSGAK

SEQ ID NO: 6417 - protein, 11 aa, Homo Sapien
YQASTSNTVSK

SEQ ID NO: 6418 - protein, 11 aa, Homo Sapien
YQAVTATLEEK

SEQ ID NO: 6419 - protein, 18 aa, Homo Sapien
YQDQLEAEIEETYANFIK

SEQ ID NO: 6420 - protein, 12 aa, Homo Sapien
YQEGGVESAFHK

SEQ ID NO: 6421 - protein, 9 aa, Homo Sapien
YQGVNLYIK

SEQ ID NO: 6422 - protein, 10 aa, Homo Sapien
YQQLIKENLK

SEQ ID NO: 6423 - protein, 13 aa, Homo Sapien
YQSHDYAFSSVEK

SEQ ID NO: 6424 - protein, 9 aa, Homo Sapien
YSEAHEISK

SEQ ID NO: 6425 - protein, 11 aa, Homo Sapien
YSESVKEAQEK

SEQ ID NO: 6426 - protein, 10 aa, Homo Sapien
YSQYQQAIYK

SEQ ID NO: 6427 - protein, 11 aa, Homo Sapien
YSTDVSVDEVK

SEQ ID NO: 6428 - protein, 9 aa, Homo Sapien
YSVDIPLDK

SEQ ID NO: 6429 - protein, 14 aa, Homo Sapien
YSVQLLTPANLLAK

SEQ ID NO: 6430 - protein, 22 aa, Homo Sapien
YTPVQQGPVGVNVTYGGDPIPK

SEQ ID NO: 6431 - protein, 19 aa, Homo Sapien
YVASYLLAALGGNSSPSAK

SEQ ID NO: 6432 - protein, 17 aa, Homo Sapien
YVDTPFGKPSDALILGK

SEQ ID NO: 6433 - protein, 9 aa, Homo Sapien
YVFENVGKK

SEQ ID NO: 6434 - protein, 14 aa, Homo Sapien
YVVLSYLGLLSQEK

SEQ ID NO: 6435 - protein, 17 aa, Homo Sapien
YVYSVLDDVIPEEILGK

SEQ ID NO: 6436 - protein, 15 aa, Homo Sapien
YYAFPQMITPLVTKG

SEQ ID NO: 6437 - protein, 24 aa, Homo Sapien
YYGGGYGSTQATFMVFQALAQYQK

SEQ ID NO: 6438 - protein, 12 aa, Homo Sapien
YYGLQILENVIK

SEQ ID NO: 6439 - protein, 13 aa, Homo Sapien
YYQTIGNHASYYK

SEQ ID NO: 6440 - protein, 16 aa, Homo Sapien
YYSQPILVKEIIEPPK

SEQ ID NO: 6441 - protein, 13 aa, Homo Sapien
IFLTEQPLEGLEK

SEQ ID NO: 6442 - protein, 18 aa, Homo Sapien
QLGEVASFGGSNIEPSVR

SEQ ID NO: 6443 - protein, 10 aa, Homo Sapien
VLSQIDVAQK

SEQ ID NO: 6444 - protein, 15 aa, Homo Sapien
TLNATGEEIIQQSSK

SEQ ID NO: 6445 - protein, 10 aa, Homo Sapien
VLSQIDVAQK

SEQ ID NO: 6446 - protein, 13 aa, Homo Sapien
SLEGSDDAVLLQR

SEQ ID NO: 6447 - protein, 14 aa, Homo Sapien
LLEQSIQSAQETEK

SEQ ID NO: 6448 - protein, 26 aa, Homo Sapien
QLNETGGPVLVSAPISPEEQDKLENK

SEQ ID NO: 6449 - protein, 14 aa, Homo Sapien
LQELQEATDELDLK

SEQ ID NO: 6450 - protein, 12 aa, Homo Sapien
VLQEDLEQEQVR

SEQ ID NO: 6451 - protein, 14 aa, Homo Sapien
TKEPVIMSTLETVR

SEQ ID NO: 6452 - protein, 17 aa, Homo Sapien
ASIPLKELEQFNSDIQK

SEQ ID NO: 6453 - protein, 9 aa, Homo Sapien
LLVEELPLR

SEQ ID NO: 6454 - protein, 9 aa, Homo Sapien
VLMDLQNQK

SEQ ID NO: 6455 - protein, 15 aa, Homo Sapien
VMVGDLEDINEMIIK

SEQ ID NO: 6456 - protein, 13 aa, Homo Sapien
LGLLLHDSIQIPR

SEQ ID NO: 6457 - protein, 12 aa, Homo Sapien
VAAAETAKHQAK

SEQ ID NO: 6458 - protein, 11 aa, Homo Sapien
LLQVAVEDRVR

SEQ ID NO: 6459 - protein, 19 aa, Homo Sapien
IFLTEQPLEGLEKLYQEPR

SEQ ID NO: 6460 - protein, 13 aa, Homo Sapien
HAQEELPPPPPQK

SEQ ID NO: 6461 - protein, 11 aa, Homo Sapien
VLSQIDVAQKK

SEQ ID NO: 6462 - protein, 11 aa, Homo Sapien
LLRDYSADDTR

SEQ ID NO: 6463 - protein, 13 aa, Homo Sapien
QAPIGGDFPAVQK

SEQ ID NO: 6464 - protein, 15 aa, Homo Sapien
RPQLEELITAAQNLK

SEQ ID NO: 6465 - protein, 9 aa, Homo Sapien
VHALNNVNK

SEQ ID NO: 6466 - protein, 17 aa, Homo Sapien
VMVGDLEDINEMIIKQK

SEQ ID NO: 6467 - protein, 10 aa, Homo Sapien
QITVDSEIRK

SEQ ID NO: 6468 - protein, 10 aa, Homo Sapien
SDSSQPMLLR

SEQ ID NO: 6469 - protein, 24 aa, Homo Sapien
QAEGLSEDGAAMAVEPTQIQLSKR

SEQ ID NO: 6470 - protein, 15 aa, Homo Sapien
LLDLLEGLTGQKLPK

SEQ ID NO: 6471 - protein, 9 aa, Homo Sapien
QASEQLNSR

SEQ ID NO: 6472 - protein, 13 aa, Homo Sapien
ELPPEERAQNVTR

SEQ ID NO: 6473 - protein, 17 aa, Homo Sapien
LLDLLEGLTGQKLPKEK

SEQ ID NO: 6474 - protein, 7 aa, Homo Sapien
GDNLQQR

SEQ ID NO: 6475 - protein, 7 aa, Homo Sapien
KLQDASR

SEQ ID NO: 6476 - protein, 19 aa, Homo Sapien
SPAQILISLESEERGELER

SEQ ID NO: 6477 - protein, 7 aa, Homo Sapien
FAAISHR

SEQ ID NO: 6478 - protein, 8 aa, Homo Sapien
KLQDVSMK

SEQ ID NO: 6479 - protein, 9 aa, Homo Sapien
LQDVSMKFR

SEQ ID NO: 6480 - protein, 16 aa, Homo Sapien
KMEEEPLGPDLEDLKR

SEQ ID NO: 6481 - protein, 8 aa, Homo Sapien
DYSADDTR

SEQ ID NO: 6482 - protein, 9 aa, Homo Sapien
TIITDRIER

SEQ ID NO: 6483 - protein, 10 aa, Homo Sapien
HSEDNPNQIR

SEQ ID NO: 6484 - protein, 17 aa, Homo Sapien
IQSDLTSHEISLEEMKK

SEQ ID NO: 6485 - protein, 6 aa, HomoSapien
LYQEPR

SEQ ID NO: 6486 - protein, 17 aa, Homo Sapien
ASIPLKELEQFNSDIQK

SEQ ID NO: 6487 - protein, 13 aa, Homo Sapien
LRQLLEQPQAEAK

SEQ ID NO: 6488 - protein, 9 aa, Homo Sapien
DYSADDTRK

SEQ ID NO: 6489 - protein, 7 aa, Homo Sapien
ELPPEER

SEQ ID NO: 6490 - protein, 9 aa, Homo Sapien
NKTSNQEAR

SEQ ID NO: 6491 - protein, 9 aa, Homo Sapien
ATMQDLEQR

SEQ ID NO: 6492 - protein, 10 aa, Homo Sapien
DQAANLMANR

SEQ ID NO: 6493 - protein, 12 aa, Homo Sapien
TAALQSATPVER

SEQ ID NO: 6494 - protein, 11 aa, Homo Sapien
QLLEQPQAEAK

SEQ ID NO: 6495 - protein, 11 aa, Homo Sapien
EEAEQVLGQAR

SEQ ID NO: 6496 - protein, 11 aa, Homo Sapien
ELEQFNSDIQK

SEQ ID NO: 6497 - protein, 10 aa, Homo Sapien
ILADLEEENR

SEQ ID NO: 6498 - protein, 10 aa, Homo Sapien
VGNILQLGSK

SEQ ID NO: 6499 - protein, 18 aa, Homo Sapien
SAVEGMPSNLDSEVAWGK

SEQ ID NO: 6500 - protein, 22 aa, Homo Sapien
LLVSDIQTIQPSLNSVNEGGQK

SEQ ID NO: 6501 - protein, 11 aa, Homo sapiens
EVGEHVVSVRK

SEQ ID NO: 6502 - protein, 14 aa, Homo sapiens
VLGGLPDWTIQEGK

1. A method for identifying candidate peptide markers for a protein from a biological sample of interest, the method comprising the steps of:
extracting proteins from the biological sample of interest and a corresponding biological sample from an animal that has been labeled with one or more stable isotopic amino acids;
mixing a quantity of protein from the biological sample of interest with a quantity of protein from the corresponding biological sample from the labeled animal to form a spiked sample;
separating the spiked sample based on a physical property;
digesting the proteins of interest using a protease;
subjecting the digested samples to mass spectrometry analysis; and
identifying unique candidate peptide markers that correspond to a protein.

2. A method for quantifying expression of a biomarker from a biological sample obtained from a subject with a disease or disorder, the method comprising the steps of:
extracting proteins from the biological sample of interest;
mixing a known quantity of protein from the biological sample of interest with a known quantity of protein from a the corresponding biological sample from a labeled animal, a labeled human cell culture, or a labeled synthetic peptide corresponding to a protein of interest to form a spiked sample;
separating the spiked sample based on a physical property;
digesting the proteins of interest using a protease;
subjecting the digested samples to mass spectrometry analysis;
determining intensities of unique candidate peptide markers that correspond to a proteins of interest; and
quantifying the amount of the protein of interest in the sample based on the relative intensity of the unique candidate peptide markers.

3. The method of claim 2, wherein the step of quantifying comprises comparing peak areas and area ratios of one or more unique candidate peptide markers from the biological sample of interest to the peak areas and area ratios of one or more labeled peptide markers.

4. The method of claim 2, wherein the step of quantifying comprises comparing the relative intensities to a standard curve generated by creating a series of dilutions of a biological sample from a normal subject with a biological sample from a subject with a disease or disorder, wherein the amount of total protein in the mixed sample remains constant; mixing a known quantity of protein from the mixed sample with a known quantity of protein a corresponding biological sample from a labeled animal or a labeled synthetic peptide corresponding to a protein of interest to form a spiked sample; separating the spiked sample based on a physical property; digesting the proteins of interest using a protease; subjecting the digested samples to mass spectrometry analysis; and generating a titration curve based on the intensities obtained for each sample.

5. A method for quantifying dystrophin expression from a biological sample obtained from a subject with Duchenne's Muscular Dystrophy, the method comprising the steps of:
extracting proteins from the biological sample of interest;
mixing a known quantity of total protein from the biological sample of interest with a known quantity of total protein a the corresponding biological sample from a labeled animal, a human cell culture, or a labeled synthetic peptide corresponding to dystrophin to form a spiked sample;
separating the spiked sample based on a physical property;
digesting the proteins of interest using a protease;
subjecting the digested samples to mass spectrometry analysis;
quantifying the amount of the protein of interest in the sample based on the relative intensity of the unique candidate peptide markers.

6. The method of claim 5, wherein the step of quantifying comprises comparing peak areas and area ratios of one or more unique candidate peptide markers from the biological sample of interest to the peak areas and area ratios of one or more labeled peptide markers.

7. The method of claim 5, wherein the step of quantifying comprises comparing the relative intensities to a standard curve generated by creating a series of dilutions of a biological sample from a normal subject with a biological sample from a subject with a disease or disorder, wherein the amount of total protein in the mixed sample remains constant; mixing a known quantity of protein from the mixed sample with a known quantity of protein a corresponding biological sample from a labeled animal, a labeled cell culture, or a labeled synthetic peptide corresponding to a protein of interest to form a spiked sample; separating the spiked sample based on a physical property; digesting the proteins of interest using a protease; subjecting the digested samples to mass spectrometry analysis; and generating a titration curve based on the intensities obtained for each sample.

8. The method of claim 5, wherein the subject is being treated with a pharmaceutical composition.

9. The method of claim 5, wherein the one or more peptides are selected from Table 1.

10. The method of claim 9, wherein the one or more peptides are selected from QAPIGGDFPAVQK, VLSQIDVAQK, IFLTEQPLEGLEK, TLNATGEEIIQQSSK, and VHALNNVNK.

11. The method of claim 2, when the proteins are extracted using a buffer comprising 10% sodium-dodecyl sulfate (SDS).

12. The method of claim 2, wherein the known quantity of total protein corresponding to the biological sample from a labeled animal or a labeled human cell culture is half the known quantity of total protein from the biological sample of interest.

13. The method of claim 12, wherein the known quantity of total protein corresponding to the biological sample of interest is 50 μg and the known quantity of total protein the corresponding to the biological sample from a labeled animal or a labeled human cell culture is 25 μg.

14. The method of claim 2, wherein the protease is trypsin.

15. The method of claim 2, wherein the spiked sample is separated based on size, charge, shape or a combination thereof using electrophoresis.

16. The method of claim 15, wherein the spiked sample is separated using gel electrophoresis.

17. The method of claim 16, further comprising the step of excising a portion of the gel containing the proteins of interest prior to the digesting step.
